United States Patent Application Publication US 2026/0226531 A1 - sequence listing, part 5

SEQ ID NO: 67853 - DNA, 110 bp, synthetic construct
  source 1..110: mol_type = other DNA
gtaccatctgtccagatgggaggcttcgagctaaatgctgagccccctgcttagcccatacacaccctgcttccagggttggctggtcaggggttagccagagtcctctg

SEQ ID NO: 67854 - DNA, 110 bp, synthetic construct; identical to SEQ ID NO: 67852
  source 1..110: mol_type = other DNA

SEQ ID NO: 67855 - DNA, 110 bp, synthetic construct; identical to SEQ ID NO: 67853
  source 1..110: mol_type = other DNA

SEQ ID NO: 67856 - DNA, 110 bp, synthetic construct
  source 1..110: mol_type = other DNA
gaataaatgaacaaatgagcaaaattggtgccgagtgaaaaatctggcaacttgtgtgtcaaagctgccttcttgtgtggatgagctgaagctcaaagagcatttctttc

SEQ ID NO: 67857 - DNA, 110 bp, synthetic construct
  source 1..110: mol_type = other DNA
gtgtcaaagctgccttcttgtgtggatgagctgaagctcaaagagcatttctttcttttttctttttctttttttttcattttagggccacacctgtggcatgtggaagt

SEQ ID NO: 67858 - DNA, 110 bp, synthetic construct
  source 1..110: mol_type = other DNA
taaatgacagcttggaagatgcttttcagcacttcataaatcacccaccggcccgggcagttggcttctgccacgtctgggttcttcctcgcgccctccccccaacccgc

SEQ ID NO: 67859 - DNA, 110 bp, synthetic construct
  source 1..110: mol_type = other DNA
aggttcagacagttctaaagttgggcaagctaaaaggcatttctatttagctattaactctggctcaggatactacaaaaatgggtttcccttcccaaagcaggcagtga

SEQ ID NO: 67860 - DNA, 110 bp, synthetic construct
  source 1..110: mol_type = other DNA
ttcgctgcaccacaatgggagctcctgcctacttgaatttgaagagggaaaactatttgtagccgcactgcctgctcttccctccccttatcttcaccattctatcagcc

SEQ ID NO: 67861 - DNA, 110 bp, synthetic construct
  source 1..110: mol_type = other DNA
tttgtagccgcactgcctgctcttccctccccttatcttcaccattctatcagccttcctgaaatatctaccaagtgtctgtcttacaaggtgggactcaaggaccatta

SEQ ID NO: 67862 - DNA, 110 bp, synthetic construct
  source 1..110: mol_type = other DNA
gcacagggggtgggttcattttaataacttcatttcacccgcgcacacgctcggccgcctcatccctccttttccaccttccgcagtaacccagcagctcttcgcagtca

SEQ ID NO: 67863 - DNA, 110 bp, synthetic construct
  source 1..110: mol_type = other DNA
cgcctcatccctccttttccaccttccgcagtaacccagcagctcttcgcagtcagggtctcgctaacagatttcctccctcgtcataattcttttggatgagccctcgt

SEQ ID NO: 67864 - DNA, 110 bp, synthetic construct; identical to SEQ ID NO: 67862
  source 1..110: mol_type = other DNA

SEQ ID NO: 67865 - DNA, 110 bp, synthetic construct; identical to SEQ ID NO: 67863
  source 1..110: mol_type = other DNA

SEQ ID NO: 67866 - DNA, 110 bp, synthetic construct
  source 1..110: mol_type = other DNA
tacatacgaggtggtgggtcattgaagttttatcagtaatggccaaaaaaaaaacccgtaaacaattaaaatttccaccaaaggggtttgggaaaactctgaaatattta

SEQ ID NO: 67867 - DNA, 110 bp, synthetic construct
  source 1..110: mol_type = other DNA
aggacgctcaggtcccttatataaaatggcatagtctttgcatgcaccttacacactagcttacctacctcctgccctatactttaaaccatcgctagattacttataat

SEQ ID NO: 67868 - DNA, 110 bp, synthetic construct
  source 1..110: mol_type = other DNA
tttctagaattttcggtctggatttggctgaaaaatcaactgcaggagcttgacccatcattccgtcccagagaagccaaggcgagcccgcagagcagcagggtggtgct

SEQ ID NO: 67869 - DNA, 110 bp, synthetic construct
  source 1..110: mol_type = other DNA
cccattgaaccgccagggagctccaccttctttttcttgaacaatagttgttacgttgttgctggcataaatgtgccactcaccaatgtgggcacatagaaattagaact

SEQ ID NO: 67870 - DNA, 110 bp, synthetic construct
  source 1..110: mol_type = other DNA
aatttctgagtctttgggggtcgtgagggtctggcacaggacctggccccctggaagtgccctgttggtggatgttgagtgaggaagtcctgggtgtcaattttcttctg

SEQ ID NO: 67871 - DNA, 110 bp, synthetic construct
  source 1..110: mol_type = other DNA
gcgactcccacccacagtcaactcttctggactgctgcctcagctcactcgcatcagtgccaaccgtgacccttcccacacccgggctgcccgtccaccctcagccttca

SEQ ID NO: 67872 - DNA, 110 bp, synthetic construct
  source 1..110: mol_type = other DNA
tcaaagcctccaaagccgaacctgcgccctgtgtcaccacaagccacctccgcagagtccagaggggtcttgctaacgagcacctcaggcctgctccctcccctgcttaa

SEQ ID NO: 67873 - DNA, 110 bp, synthetic construct
  source 1..110: mol_type = other DNA
agtccagaggggtcttgctaacgagcacctcaggcctgctccctcccctgcttaaattccttctgtggtccccaggatccagttcaaagtctggatgtgtctgcttctgg

SEQ ID NO: 67874 - DNA, 110 bp, synthetic construct
  source 1..110: mol_type = other DNA
tcagtccagggtgaccctcaatgaccctcttcctgttcaagagggagatgcacagtctctgtaaaaatgctcctcctccgtgtctgtgccctggtacctcagggactcct

SEQ ID NO: 67875 - DNA, 110 bp, synthetic construct
  source 1..110: mol_type = other DNA
tctctgtaaaaatgctcctcctccgtgtctgtgccctggtacctcagggactccttttaacactaactgaggctgcctgctgcatctggcctgcgtttgggtagaaactc

SEQ ID NO: 67876 - DNA, 110 bp, synthetic construct; identical to SEQ ID NO: 67874
  source 1..110: mol_type = other DNA

SEQ ID NO: 67877 - DNA, 110 bp, synthetic construct; identical to SEQ ID NO: 67875
  source 1..110: mol_type = other DNA

SEQ ID NO: 67878 - DNA, 110 bp, synthetic construct
  source 1..110: mol_type = other DNA
aaatcttattctgctagagtttctcaagctcagaataaataatgtaggagtaatcaaacacagagatgatttctatattcaagcctacctaacaaacgggcactaagcag

SEQ ID NO: 67879 - DNA, 110 bp, synthetic construct
  source 1..110: mol_type = other DNA
cctgtggagcaaagggtacttatcgggtacttcaattctgggtgccaaattcagagggaaagccccttgcatggtctgaacacttagtgggacttagcagagtgctataa

SEQ ID NO: 67880 - DNA, 110 bp, synthetic construct
  source 1..110: mol_type = other DNA
gggaaagccccttgcatggtctgaacacttagtgggacttagcagagtgctataaaaaaacagagattccgattctgaaaatcatgcacatagacttgctttctccttgt

SEQ ID NO: 67881 - DNA, 110 bp, synthetic construct; identical to SEQ ID NO: 67879
  source 1..110: mol_type = other DNA

SEQ ID NO: 67882 - DNA, 110 bp, synthetic construct; identical to SEQ ID NO: 67880
  source 1..110: mol_type = other DNA

SEQ ID NO: 67883 - DNA, 110 bp, synthetic construct
  source 1..110: mol_type = other DNA
caaataacaatacataggaagttaatgcaatagagattaagctagacacagagtccctgctttagtagtataacaaaaaggactgtgaggtaatgaggccagagaccaaa

SEQ ID NO: 67884 - DNA, 110 bp, synthetic construct
  source 1..110: mol_type = other DNA
acaaatgctggaggcaggtatggagaaaagggaacccttacttaagtcgtcttaaatcttactacatatttgtctttcttattgtgattttgtctttccaatagattctt

SEQ ID NO: 67885 - DNA, 110 bp, synthetic construct; identical to SEQ ID NO: 67884
  source 1..110: mol_type = other DNA

SEQ ID NO: 67886 - DNA, 110 bp, synthetic construct
  source 1..110: mol_type = other DNA
agaagaatgttgcattttcattaccaagactcttctcatgatggaacacaaggaaagggggatggattttggagctggagaagaacatggcagatgacaggcactcttgg

SEQ ID NO: 67887 - DNA, 110 bp, synthetic construct
  source 1..110: mol_type = other DNA
agggggatggattttggagctggagaagaacatggcagatgacaggcactcttggcatgtaacaagaaactgcccagccccataccaacttcagccacaaggggggcagg

SEQ ID NO: 67888 - DNA, 110 bp, synthetic construct
  source 1..110: mol_type = other DNA
atgaaaaagagtaggccagaaacaggttcaaggaagggagccaggcttacataaagagacacagtcagagaaagggctctgtgttataaagctgtactgataggaagcca

SEQ ID NO: 67889 - DNA, 110 bp, synthetic construct
  source 1..110: mol_type = other DNA
gcagagattgtgtcaaaactgttaccttttacatctattcaaagctctagaaaaagacaggcatgaaacttcgaggtgagtagaaagtgctctccaaggaaagaagttat

SEQ ID NO: 67890 - DNA, 110 bp, synthetic construct
  source 1..110: mol_type = other DNA
cagtaagcatgagagataagaaatttactcatgtgactatgtggggaccgctgaatctaaaatctacagggcaggccagcaggttgatgttgcagtcttgagactgaaag

SEQ ID NO: 67891 - DNA, 110 bp, synthetic construct
  source 1..110: mol_type = other DNA
tctaaaatctacagggcaggccagcaggttgatgttgcagtcttgagactgaaagtgatctggaattacaagtccttcttctttgaggtcctcaatcttttaaagtcttc

SEQ ID NO: 67892 - DNA, 110 bp, synthetic construct
  source 1..110: mol_type = other DNA
cactgagcctagttgccactggtcattgcactaggagaatggggcttggaatgttcacctattctagttgcagcttggtccctgcacagggtgggtgggactcagcttgc

SEQ ID NO: 67893 - DNA, 110 bp, synthetic construct
  source 1..110: mol_type = other DNA
agctggtacactaaagccccagggctgtcgctagagttggtacattacagccacaggggctattgccagagctgatacattgcggtgcagggctgctggacagctgccgt

SEQ ID NO: 67894 - DNA, 110 bp, synthetic construct
  source 1..110: mol_type = other DNA
ggggctattgccagagctgatacattgcggtgcagggctgctggacagctgccgtaacatttccttttctgtgaagggaatcaaaccagaaacatcagggcgaatgatag

SEQ ID NO: 67895 - DNA, 110 bp, synthetic construct; identical to SEQ ID NO: 67894
  source 1..110: mol_type = other DNA

SEQ ID NO: 67896 - DNA, 110 bp, synthetic construct; identical to SEQ ID NO: 67894
  source 1..110: mol_type = other DNA

SEQ ID NO: 67897 - DNA, 110 bp, synthetic construct
  source 1..110: mol_type = other DNA
ggagctttgtggtagctaggatgcatcaggaaagaattccccaggagaaagtggaagccatgtcccaggaagtgttctgtccatctgaactcctcattaggggaatgttg

SEQ ID NO: 67898 - DNA, 110 bp, synthetic construct
  source 1..110: mol_type = other DNA
agccatgtcccaggaagtgttctgtccatctgaactcctcattaggggaatgttgctgagaagtttcaggatctgaactggctggaccatttgagcactgtctgagattt

SEQ ID NO: 67899 - DNA, 110 bp, synthetic construct; identical to SEQ ID NO: 67897
  source 1..110: mol_type = other DNA

SEQ ID NO: 67900 - DNA, 110 bp, synthetic construct; identical to SEQ ID NO: 67898
  source 1..110: mol_type = other DNA

SEQ ID NO: 67901 - DNA, 110 bp, synthetic construct
  source 1..110: mol_type = other DNA
cagattgggaggcagtgggaggcccctggctacctttgatcatggtgatgttctaggaaaaggaacctggtagctgtgttcaaacaggatttcaggaggcagagaccagt

SEQ ID NO: 67902 - DNA, 110 bp, synthetic construct
  source 1..110: mol_type = other DNA
ggaaaaggaacctggtagctgtgttcaaacaggatttcaggaggcagagaccagttaggaaggtgttgaatttgtccaagtcctcaaaggagtggcctgcccctggcctg

SEQ ID NO: 67903 - DNA, 110 bp, synthetic construct
  source 1..110: mol_type = other DNA
ctttctggctgttgcacatgctaactgtaggactcagggaagtgatgtagctcctctgagcttcatttcctcatacaaagtgaagatggcaccaatgtcactattagtat

SEQ ID NO: 67904 - DNA, 110 bp, synthetic construct
  source 1..110: mol_type = other DNA
ctgagcttcatttcctcatacaaagtgaagatggcaccaatgtcactattagtatcacagggtatgcggaggttacacgagatactgcatataaaattggcaactgcaca

SEQ ID NO: 67905 - DNA, 110 bp, synthetic construct
  source 1..110: mol_type = other DNA
ggcttctgacttccagaacaagtaggaaaagtttctgttgctttaagacacaattttgtggtaatttgttgcagcagtcctaggaagtgaacatattctgccctagcgga

SEQ ID NO: 67906 - DNA, 110 bp, synthetic construct
  source 1..110: mol_type = other DNA
ttagtcttaatgatgcatttaccactctagggccactgttcctctgttccgtcatgcgagagctggcctgtgaagcagccaccatcttgtttgtgtagaagtggagtgcg

SEQ ID NO: 67907 - DNA, 110 bp, synthetic construct
  source 1..110: mol_type = other DNA
gcgagagctggcctgtgaagcagccaccatcttgtttgtgtagaagtggagtgcgttataaattccaatgaggtaatttgcaaggagaccttggagaagactctgcacaa

SEQ ID NO: 67908 - DNA, 110 bp, synthetic construct; identical to SEQ ID NO: 67906
  source 1..110: mol_type = other DNA

SEQ ID NO: 67909 - DNA, 110 bp, synthetic construct; identical to SEQ ID NO: 67907
  source 1..110: mol_type = other DNA

SEQ ID NO: 67910 - DNA, 110 bp, synthetic construct
  source 1..110: mol_type = other DNA
tatccaccttccttcaacgttgctaccctaccacgttcccattccatctcctccagggtgctctggccaaccccttaggctcaacctcttccaaatttaatttatgatct

SEQ ID NO: 67911 - DNA, 110 bp, synthetic construct
  source 1..110: mol_type = other DNA
gggtgctctggccaaccccttaggctcaacctcttccaaatttaatttatgatctctcactacacaagcctgcccaaatccactgcctaaccctgctgccaatttaacat

SEQ ID NO: 67912 - DNA, 110 bp, synthetic construct
  source 1..110: mol_type = other DNA
cgggaggttgccgatggctacctggggcagtgggctcctcgggcttcttgtcctgggactgtctgaggtaccgcttcagctcatttttgaggtcggaggtgccctgacag

SEQ ID NO: 67913 - DNA, 110 bp, synthetic construct
  source 1..110: mol_type = other DNA
ggactgtctgaggtaccgcttcagctcatttttgaggtcggaggtgccctgacagacgccctttatcagctcatggttcagctccaccttggggacgtagacaggcttcg

SEQ ID NO: 67914 - DNA, 110 bp, synthetic construct; identical to SEQ ID NO: 67912
  source 1..110: mol_type = other DNA

SEQ ID NO: 67915 - DNA, 110 bp, synthetic construct; identical to SEQ ID NO: 67913
  source 1..110: mol_type = other DNA

SEQ ID NO: 67916 - DNA, 110 bp, synthetic construct
  source 1..110: mol_type = other DNA
gttggagtgaccctcttggttttcatatcttcgttatctctcctgggacttcatgtcattcccccaaacttcccataccatcggaggtcattctttgctctttctttcat

SEQ ID NO: 67917 - DNA, 110 bp, synthetic construct
  source 1..110: mol_type = other DNA
ggatggaaaagcactgcagccatttatccaccaagaccagagctgcagataccaccacgtgcaagacaatcccacctgagtctgacctgtcctgtgtcccaccccatggg

SEQ ID NO: 67918 - DNA, 110 bp, synthetic construct
  source 1..110: mol_type = other DNA
acataaaggttacattaaaacaagacttaaaaccaacggtctttaacatcccgtttaacgagctgttaaaagagttcggaatcaagagtccaaaattatttgtaaagtta

SEQ ID NO: 67919 - DNA, 110 bp, synthetic construct
  source 1..110: mol_type = other DNA
cagtcctaagatgagtaaggtctgcaggtttaaggcacagctcggtgactccgctgacaataccgggttgtatgcttgaaagttgctctgacggtagagctttaatgtta

SEQ ID NO: 67920 - DNA, 110 bp, synthetic construct
  source 1..110: mol_type = other DNA
tcaggcccaacacgaggcatgagcatgctgggcaaaatacaagacacgttgggccactcttcctacacaacgccacatgctaatcctacaggaattcaagggtctccaaa

SEQ ID NO: 67921 - DNA, 110 bp, synthetic construct
  source 1..110: mol_type = other DNA
tgttaggtcatggcctagaagatatccagatttagctaccagatttgaagaaactggcatgagtccagatgatggtagtgtcaggcatttgtgctatagaaaaagaatta

SEQ ID NO: 67922 - DNA, 110 bp, synthetic construct
  source 1..110: mol_type = other DNA
ctcccttattggacagtacaggtctatgtaataagagtaacacaatcaaaatattgagttgtctactggcctcagtttttcctcttacacacttcctcaggttgtatttg

SEQ ID NO: 67923 - DNA, 110 bp, synthetic construct
  source 1..110: mol_type = other DNA
gctcaaggattaccttaaaatagtctctattccagtccttaacttgtttatgaaacagatttttttttcctttggccatacccacagcctgcagaagttcctgggccagg

SEQ ID NO: 67924 - DNA, 110 bp, synthetic construct
  source 1..110: mol_type = other DNA
tctattccagtccttaacttgtttatgaaacagatttttttttcctttggccatacccacagcctgcagaagttcctgggccagggattgaacctttgccacagtagtga

SEQ ID NO: 67925 - DNA, 110 bp, synthetic construct
  source 1..110: mol_type = other DNA
ccgatgccttgaaggaatgagtatgtgatttctattggttgaaaaatcaaaagggatgaagatgacattattgccactatcttgcttaaattctgaacttggtagaactg

SEQ ID NO: 67926 - DNA, 110 bp, synthetic construct
  source 1..110: mol_type = other DNA
tgcagccgggcctctcctgtggggttcttctggtaacaaaatgctcaagatcagcaattcttttccactcttacccacgctctgtgaggagctaactgggctattcctca

SEQ ID NO: 67927 - DNA, 110 bp, synthetic construct
  source 1..110: mol_type = other DNA
aattcttttccactcttacccacgctctgtgaggagctaactgggctattcctcaggctccactttccgtgtctgaaatgtggttgaaaacgaatattccagatgtttcc

SEQ ID NO: 67928 - DNA, 110 bp, synthetic construct; identical to SEQ ID NO: 67926
  source 1..110: mol_type = other DNA

SEQ ID NO: 67929 - DNA, 110 bp, synthetic construct; identical to SEQ ID NO: 67927
  source 1..110: mol_type = other DNA

SEQ ID NO: 67930 - DNA, 110 bp, synthetic construct
  source 1..110: mol_type = other DNA
gcatgatgtcctgaagattcatccaacgtgttgcatgtattaatacttcaatccaatttcctccatgcacaccttaaataccagtctaagtcagggatgtgctctgtttt

SEQ ID NO: 67931 - DNA, 110 bp, synthetic construct
  source 1..110: mol_type = other DNA
aacacacctaaaagggagccagatattggagttatcagaaacaaactaaaatgactgtctttattgtgcttaaatagtttggttatttaaggaaaatggaatttctagag

SEQ ID NO: 67932 - DNA, 110 bp, synthetic construct
  source 1..110: mol_type = other DNA
gtgctcggtgcattgtactgcctttttctttgtggagtggtttcatcttggcattcttatggtaatgccagtttagaaagacatttggatttgcttaaaaaggcccaaga

SEQ ID NO: 67933 - DNA, 110 bp, synthetic construct
  source 1..110: mol_type = other DNA
cttatggtaatgccagtttagaaagacatttggatttgcttaaaaaggcccaagatggctttaaagtcacagtttttcttgagacagagaaagaaaccccttcataaatt

SEQ ID NO: 67934 - DNA, 110 bp, synthetic construct
  source 1..110: mol_type = other DNA
tctatggccccggtgtaaaatgtgatcatccatttcaaaattatctctcgatcgtgagcctaaagctgatcgtttagattctggtctcgtgttgggcgtcagtttgaaga

SEQ ID NO: 67935 - DNA, 110 bp, synthetic construct
  source 1..110: mol_type = other DNA
tgatagaaataacattcttcactgacttccttcaggtatcttccgtttttgcaagaacttactgtaactaggagttcccatcgtggcgcagtggttagcgaatctgacta

SEQ ID NO: 67936 - DNA, 110 bp, synthetic construct
  source 1..110: mol_type = other DNA
cttccttcaggtatcttccgtttttgcaagaacttactgtaactaggagttcccatcgtggcgcagtggttagcgaatctgactaggaacaatgaggttgctggttcgct

SEQ ID NO: 67937 - DNA, 110 bp, synthetic construct
  source 1..110: mol_type = other DNA
aaagtctgccaggtgccaggaaactcagaagtgaacaaagccaacttgggcttagaggtcgggatagcccacatttctcccctgcagggtacattcgtggtgagctggat

SEQ ID NO: 67938 - DNA, 110 bp, synthetic construct
  source 1..110: mol_type = other DNA
aggtcgggatagcccacatttctcccctgcagggtacattcgtggtgagctggatttttccagactttggggacgaccttcttcatggggagaataagacttccttggct

SEQ ID NO: 67939 - DNA, 110 bp, synthetic construct
  source 1..110: mol_type = other DNA
tgcaggctgacctgacctcagcgacagtgggcacagctgcgaccattctctgagcacctgctgtattcctcctctcgtcttctcactcctggagttcagtagtacttggc

SEQ ID NO: 67940 - DNA, 110 bp, synthetic construct
  source 1..110: mol_type = other DNA
acctgctgtattcctcctctcgtcttctcactcctggagttcagtagtacttggcccattttacagatgcgtgaaccatctagcaagatcacagcagttttctgaacttt

SEQ ID NO: 67941 - DNA, 110 bp, synthetic construct
  source 1..110: mol_type = other DNA
ttgttaacatggcctgggaaggctggtttctagtacaacagcttcagtacatcctaggaaaggctcagcatcactcaccactgctgagtctggctggagttcgccttggg

SEQ ID NO: 67942 - DNA, 110 bp, synthetic construct
  source 1..110: mol_type = other DNA
aggaaaggctcagcatcactcaccactgctgagtctggctggagttcgccttgggaggcttacagttcatgatatacaagctctggagcacaaaccagctgaagccagca

SEQ ID NO: 67943 - DNA, 110 bp, synthetic construct; identical to SEQ ID NO: 67941
  source 1..110: mol_type = other DNA

SEQ ID NO: 67944 - DNA, 110 bp, synthetic construct; identical to SEQ ID NO: 67942
  source 1..110: mol_type = other DNA

SEQ ID NO: 67945 - DNA, 110 bp, synthetic construct
  source 1..110: mol_type = other DNA
ggcaaaaccccgtgtgctagctagccgagctcgcctcacaccgcagggctcttccacagggagcaggacattttcttgttgacccagccgtaccctgcagctcctgtctt

SEQ ID NO: 67946 - DNA, 110 bp, synthetic construct
  source 1..110: mol_type = other DNA
acagggagcaggacattttcttgttgacccagccgtaccctgcagctcctgtctttttcagctcttaggccaagtggaagaggagatcctggcaggtttcaaacaagctc

SEQ ID NO: 67947 - DNA, 110 bp, synthetic construct
  source 1..110: mol_type = other DNA
gagctgtacacttaaaagtggttaaaatggtaaattctgttatgtatatttaacacacgccatactctaaaagaaaaattaggtgaatctgtagtttccttctggtctta

SEQ ID NO: 67948 - DNA, 110 bp, synthetic construct
  source 1..110: mol_type = other DNA
cacgccatactctaaaagaaaaattaggtgaatctgtagtttccttctggtcttaatgttctttggattgatgatcctggattcaaagaaatgccaggggacttattatt

SEQ ID NO: 67949 - DNA, 110 bp, synthetic construct
  source 1..110: mol_type = other DNA
acccatctcatgtggactagtccagtggcccttgacacgtgctgtcactctgtctcttgtcctctagccatcctttgctcagctgccagggcaagggtctgctcacagtc

SEQ ID NO: 67950 - DNA, 110 bp, synthetic construct
  source 1..110: mol_type = other DNA
tacggtgatgaataaggtaaggtccctggctgccaggtgctcagggcccctcccacaacaacctgttatactccagcattacagtggctgtggtgaaagtttgtatagcc

SEQ ID NO: 67951 - DNA, 110 bp, synthetic construct
  source 1..110: mol_type = other DNA
caacaacctgttatactccagcattacagtggctgtggtgaaagtttgtatagcccggagcgtctggatttgctttttccttctttttcttttcctttttaaggctgaac

SEQ ID NO: 67952 - DNA, 110 bp, synthetic construct
  source 1..110: mol_type = other DNA
acacaacagcccggtccttgtcacatgcttgagtgcaatttgaatcgaccaggtacactctcagatttccatcctgaaaagatgctcttctgcactccacttctctgtct

SEQ ID NO: 67953 - DNA, 110 bp, synthetic construct
  source 1..110: mol_type = other DNA
cactctcagatttccatcctgaaaagatgctcttctgcactccacttctctgtctttcctcttgtttctgtggatgaagtgtctctgcctctttcaaaggccaccccttc

SEQ ID NO: 67954 - DNA, 110 bp, synthetic construct
  source 1..110: mol_type = other DNA
tcatttagaaagaactcttcaatttatagcatcttaattgcttagggttttcaattctgacaaaggaagctccatttttagcaggagtgggggtcaggccgaggggagga

SEQ ID NO: 67955 - DNA, 110 bp, synthetic construct
  source 1..110: mol_type = other DNA
tctgacaaaggaagctccatttttagcaggagtgggggtcaggccgaggggaggattcattcataatgacaaagacatcgggtcagtgtggtgcttgatggctgcgtcgg

SEQ ID NO: 67956 - DNA, 110 bp, synthetic construct
  source 1..110: mol_type = other DNA
gacataattccccactcctatgagagagagctttaatgtgtattaatctctttcggcattcaaacatacaaaggttcacttttacaggttagtgcccgctttctacaaaa

SEQ ID NO: 67957 - DNA, 110 bp, synthetic construct
  source 1..110: mol_type = other DNA
tcttcccacttgtcagaggtgaagtcctgtgtgcagcagaacttgaatgggatggcactgccagcacactggctgttgtgacacgaggtgatctggaaccctgtccaccc

SEQ ID NO: 67958 - DNA, 110 bp, synthetic construct
  source 1..110: mol_type = other DNA
cactgccagcacactggctgttgtgacacgaggtgatctggaaccctgtccacccacgtcacgcctgctctgcctgttttgaggcgccacaccatcctgtgctcagtcac

SEQ ID NO: 67959 - DNA, 110 bp, synthetic construct; identical to SEQ ID NO: 67957
  source 1..110: mol_type = other DNA

SEQ ID NO: 67960 - DNA, 110 bp, synthetic construct; identical to SEQ ID NO: 67958
  source 1..110: mol_type = other DNA

SEQ ID NO: 67961 - DNA, 110 bp, synthetic construct
  source 1..110: mol_type = other DNA
tgcaacagaaaccttatgatccaccaagcttcaaattttctctaactggcctgcacaggaaaaagtttgctaggagttcccgtcatggctcaatggttaacgaatccgat

SEQ ID NO: 67962 - DNA, 110 bp, synthetic construct
  source 1..110: mol_type = other DNA
gtaactggttgtttccctggcagtaaagtattgatcttcctttttcaggccactcaattaccaggcttcccttctatttctgctgcctttcttttcaggctgatgttttt

SEQ ID NO: 67963 - DNA, 110 bp, synthetic construct
  source 1..110: mol_type = other DNA
aattaccaggcttcccttctatttctgctgcctttcttttcaggctgatgtttttcccccactcattccccagggtcacatctcttctcgctcagaccagacgatgttca

SEQ ID NO: 67964 - DNA, 110 bp, synthetic construct
  source 1..110: mol_type = other DNA
ggggcctcttttgaaagcctgtctgcccagtgggctggctcagcccagatggcctgagtctttgaacccgatctgactgtgtcttcaagggcttctcatccttccactga

SEQ ID NO: 67965 - DNA, 110 bp, synthetic construct
  source 1..110: mol_type = other DNA
gagtctttgaacccgatctgactgtgtcttcaagggcttctcatccttccactgaaagatcccctgggactgggtggaggaacctttactgctataggatctggtatttg

SEQ ID NO: 67966 - DNA, 110 bp, synthetic construct
  source 1..110: mol_type = other DNA
acctacctcggggcacgctgccctctgtgcactgactcggtcttctttaccaggttgaagtgtcataacaagtgtacaaaagaagcccctgcctgtagaatatccttcct

SEQ ID NO: 67967 - DNA, 110 bp, synthetic construct
  source 1..110: mol_type = other DNA
tgacatgaagatagtttggattgttgtgtgaaataaaatatttttaaaaattaactccaccttaagaaaataaagggctactagagagtctcaaatgacgtgtgcggccc

SEQ ID NO: 67968 - DNA, 110 bp, synthetic construct; identical to SEQ ID NO: 67967
  source 1..110: mol_type = other DNA

SEQ ID NO: 67969 - DNA, 110 bp, synthetic construct
  source 1..110: mol_type = other DNA
tttcagttttttgttgtaaatattacagaattaagattatcctataatgtcactctccctccttttcatttctctggaggttcgaggggcagggcgttagtgacagttgg

SEQ ID NO: 67970 - DNA, 110 bp, synthetic construct
  source 1..110: mol_type = other DNA
tccctccttttcatttctctggaggttcgaggggcagggcgttagtgacagttggtgcacagggagtagtgcacactgcatggaccaccctgtctgtatgacagtggtca

SEQ ID NO: 67971 - DNA, 110 bp, synthetic construct
  source 1..110: mol_type = other DNA
cactttccacgtatactcgaagtctgttcattgttagtgcgaggacgtccctccgctacggatcctaaaacaatttccagaaaggtggcagtggtacagagagatcctgg

SEQ ID NO: 67972 - DNA, 110 bp, synthetic construct
  source 1..110: mol_type = other DNA
cccaggcagtgccgagccattgaaagtttttggttttttgtatggctgcacccacggcatgtggaatttcctgagccaggaattgaatttgagctacagctgcaggccac

SEQ ID NO: 67973 - DNA, 110 bp, synthetic construct
  source 1..110: mol_type = other DNA
gtcaagggaaaagtggaaaatataaggatggatcatacaacctagcgaatatagctagtattttatcactaaaatggagtataacctgtaaaattgtgaatcactgtatt

SEQ ID NO: 67974 - DNA, 110 bp, synthetic construct
  source 1..110: mol_type = other DNA
gtctcttagtgtcatctgaggggtagggagaccctggtagagccagcctctcaggctaggtggtcatagcagaggagaaaaggggaccaggcagctatgcctcagaaagt

SEQ ID NO: 67975 - DNA, 110 bp, synthetic construct
  source 1..110: mol_type = other DNA
ctaggtggtcatagcagaggagaaaaggggaccaggcagctatgcctcagaaagtgagagacgggcgttttttgaaggatggcctttcttatttccttgaaaccaagcat

SEQ ID NO: 67976 - DNA, 110 bp, synthetic construct
  source 1..110: mol_type = other DNA
tgtgggaggaggaatcagagaggtacagcagctccctggggtcacacatctagtgccaaatgtcggttccccattcagcgttaccctagtcctgctctctttcgcacatg

SEQ ID NO: 67977 - DNA, 110 bp, synthetic construct
  source 1..110: mol_type = other DNA
ggataagctttatccccactgagtagaatgaataatgacattatcacactggtccttatcagatgtagttggctccaataactcatttggatgtaccacgcccagcacaa

SEQ ID NO: 67978 - DNA, 110 bp, synthetic construct
  source 1..110: mol_type = other DNA
tctctccccaccctatcctggtacccgagggcctcaagggtgacctgggaagacgtttgggagtgaggcagctggggaggcctgcgtgcccttgtggcagctccatcctg

SEQ ID NO: 67979 - DNA, 110 bp, synthetic construct
  source 1..110: mol_type = other DNA
tttgggagtgaggcagctggggaggcctgcgtgcccttgtggcagctccatcctgggcctataatgaagatggcttttgagcttacaaaggacaataaattattactttg

SEQ ID NO: 67980 - DNA, 110 bp, synthetic construct; identical to SEQ ID NO: 67978
  source 1..110: mol_type = other DNA

SEQ ID NO: 67981 - DNA, 110 bp, synthetic construct; identical to SEQ ID NO: 67979
  source 1..110: mol_type = other DNA

SEQ ID NO: 67982 - DNA, 110 bp, synthetic construct
  source 1..110: mol_type = other DNA
ctactgcagctcacccctactcccagtggaaccctgtctagcagctccagggacatacgaagaaggtgtgagccaagcgttctggacacacaccatgtgagaaggaaacc

SEQ ID NO: 67983 - DNA, 110 bp, synthetic construct
  source 1..110: mol_type = other DNA
tagaaactcttgtgccagtgaaaacaaatattctcattatcaggaatacctgtgagtacaaataaatttatttctgatagtgatttaaaataagcttcaaggagttcccg

SEQ ID NO: 67984 - DNA, 110 bp, synthetic construct
  source 1..110: mol_type = other DNA
gtacaaataaatttatttctgatagtgatttaaaataagcttcaaggagttcccgtcatggtgcaatggaaacaaatccgactaagaaccatgagattgcgtgttcaatc

SEQ ID NO: 67985 - DNA, 110 bp, synthetic construct
  source 1..110: mol_type = other DNA
cctcaggctgccacagaaactaggtacgaggttcaccccacccccacccactcatcctcccaccttggtgagtttgtgtcttcttgagatagatactgcctgccctgatc

SEQ ID NO: 67986 - DNA, 110 bp, synthetic construct
  source 1..110: mol_type = other DNA
tactgctacatactataagacagatgagccctgaaagaggccatgtctcaagggaaaggtgtctgtctcaaaagatcatttatatggttccacttacatggaacacccag

SEQ ID NO: 67987 - DNA, 110 bp, synthetic construct
  source 1..110: mol_type = other DNA
aaggtgtctgtctcaaaagatcatttatatggttccacttacatggaacacccagaacaggcaaatctatagagaccaaaggtagattagtgattacttagggctgagag

SEQ ID NO: 67988 - DNA, 110 bp, synthetic construct
  source 1..110: mol_type = other DNA
aggagaaaaatactttgccacctttagtaggtactcccattttacacttttcacagtctttagctcaaaggattcaccattaatctcaaactatttcaaaaaagggctgt

SEQ ID NO: 67989 - DNA, 110 bp, synthetic construct
  source 1..110: mol_type = other DNA
gccctaaatcaacccagggccagatacagatagctagggactgcccctatgccccagagcctgctgggattattcaaactgccaatcctaaactgtttacctttccaata

SEQ ID NO: 67990 - DNA, 110 bp, synthetic construct
  source 1..110: mol_type = other DNA
agagcctgctgggattattcaaactgccaatcctaaactgtttacctttccaataaaggctctggctttccactttctcttgcttctgcctcctggtgctctgtctgtca

SEQ ID NO: 67991 - DNA, 110 bp, synthetic construct
  source 1..110: mol_type = other DNA
ttgactgatgggaggaaaatgcatcgggcccaggaaggtgctttcaaacaggaatggagttgcctgtttctctctggaccacgggacccagcttgctaactgatgatccc

SEQ ID NO: 67992 - DNA, 110 bp, synthetic construct
  source 1..110: mol_type = other DNA
ggagttgcctgtttctctctggaccacgggacccagcttgctaactgatgatcccctaagcagtgctgggcagcccgtggtggctttgtttctgcgatgctgcagccctg

SEQ ID NO: 67993 - DNA, 110 bp, synthetic construct
  source 1..110: mol_type = other DNA
ctaacccacagtgtcattgtgatgtaggcgagttttcaagagggctccaacttaccactgaaatttatggtaagagttaatgaaaagtttcagttccgtctaagatttct

SEQ ID NO: 67994 - DNA, 110 bp, synthetic construct
  source 1..110: mol_type = other DNA
ttgtgggcgcccagctagtcagcggggaggggttcggaactaactaacacagccagggtcggctgggatggcaccacccccaaagtcctttctggttctaagtgtctatc

SEQ ID NO: 67995 - DNA, 110 bp, synthetic construct
  source 1..110: mol_type = other DNA
gggtcggctgggatggcaccacccccaaagtcctttctggttctaagtgtctatcattctagttcagatcccattttaagggaaggaatcaagcctcggcgaggattgag

SEQ ID NO: 67996 - DNA, 110 bp, synthetic construct
  source 1..110: mol_type = other DNA
gcccggtttgtctctgttccaccagggatcagaacgcttccccactgctcactgccttctcaaggggtttgcttgagaagggtctgctgggccctgggcagatacagcca

SEQ ID NO: 67997 - DNA, 110 bp, synthetic construct
  source 1..110: mol_type = other DNA
cttctcaaggggtttgcttgagaagggtctgctgggccctgggcagatacagccacccttcctcccagcccagagcttcccagcttactagcttgcagggcctgtgggga

SEQ ID NO: 67998 - DNA, 110 bp, synthetic construct
  source 1..110: mol_type = other DNA
tctttgttctgtcttggtctttctcgcaatctctcacgtcgcttctggctggctggcccttgttgctgcctcagtcacagccacacctgtaacccatctctgggtatctt

SEQ ID NO: 67999 - DNA, 110 bp, synthetic construct
  source 1..110: mol_type = other DNA
ggcaaagaattcatatccttgatataaaggtctttataaatcaatgagaaaaagatgaacaactcagctgaaaattggggaaagagtaaccaaatcatctataggtaaaa

SEQ ID NO: 68000 - DNA, 110 bp, synthetic construct
  source 1..110: mol_type = other DNA
tccttcctacccctgctgagaacctgcctgtgaacaaccaggtttcttccaaatagggctttagccatcatccttggatctttaatgttttagacgttttcttgggctgc

SEQ ID NO: 68001 - DNA, 110 bp, synthetic construct
  source 1..110: mol_type = other DNA
gtactaagaggcctgaaaagaattctacctgtttggagagagaaaagtcacccagggttttggaagagtatcctctcctttgtgatacaactagcggggaggacagccaa

SEQ ID NO: 68002 - DNA, 110 bp, synthetic construct
  source 1..110: mol_type = other DNA
tctccctcattgcctctccttcctcccacaagcgcccattctcttctcaccaggcttccttcctccatgttttttgttctgcgattccttgctcaggtggctcagcttgg

SEQ ID NO: 68003 - DNA, 110 bp, synthetic construct
  source 1..110: mol_type = other DNA
ttccttcctccatgttttttgttctgcgattccttgctcaggtggctcagcttggaaaatcaccaaggacagttgccctttactgaccttcactgcagccagcctcagag

SEQ ID NO: 68004 - DNA, 110 bp, synthetic construct
  source 1..110: mol_type = other DNA
ctgatcgaaaggttagaacgaccactcgctggggccgaggtcctgtatgtaggcttactgatcaggaaggtcagtcctatgaataggatgtaggtgaggcaggtgctgtc

SEQ ID NO: 68005 - DNA, 110 bp, synthetic construct
  source 1..110: mol_type = other DNA
tactgatcaggaaggtcagtcctatgaataggatgtaggtgaggcaggtgctgtccagtagaggatgtacagagagcaagagaacggtcatcttgggaggcctgaccata

SEQ ID NO: 68006 - DNA, 110 bp, synthetic construct
  source 1..110: mol_type = other DNA
cattttgcttgaaatctgtttggaggtagtgagctccccatcacagaggagatgcaaagacaagaccaggtgttaactggacagagatgctaaaaatacagtacctctat

SEQ ID NO: 68007 - DNA, 110 bp, synthetic construct
  source 1..110: mol_type = other DNA
acaaaggaaaaaaaaaaagaaactaaaattaccttccccttcatcaaatgcctatgaggacatgaaaatctctggattcagagtatttaagctaaggctgtccagcaatt

SEQ ID NO: 68008 - DNA, 110 bp, synthetic construct
  source 1..110: mol_type = other DNA
tccagggcttccttcagtttccacaagaagaagattgttgtgactgctgtgtcgaacgtgtgtagcagctacaccgttgccagttccctctctcagtccctcatgtcaga

SEQ ID NO: 68009 - DNA, 110 bp, synthetic construct
  source 1..110: mol_type = other DNA
acgtgtgtagcagctacaccgttgccagttccctctctcagtccctcatgtcagaacattcaaaccctcctgtcacgaacagaacaaacagtgctctgtccccttggcac

SEQ ID NO: 68010 - DNA, 110 bp, synthetic construct
  source 1..110: mol_type = other DNA
ccctactctttataatgcttattactctatgcttatatactccctattagttttgtttatctcccctacacccactagaatgaaagctctaaaagggcacggacttttgt

SEQ ID NO: 68011 - DNA, 110 bp, synthetic construct
  source 1..110: mol_type = other DNA
tttatctcccctacacccactagaatgaaagctctaaaagggcacggacttttgtttagtgatatattccagcacctgttccagtccctggcatgtagtaggccctctgt

SEQ ID NO: 68012 - DNA, 110 bp, synthetic construct; identical to SEQ ID NO: 68010
  source 1..110: mol_type = other DNA

SEQ ID NO: 68013 - DNA, 110 bp, synthetic construct; identical to SEQ ID NO: 68011
  source 1..110: mol_type = other DNA

SEQ ID NO: 68014 - DNA, 110 bp, synthetic construct
  source 1..110: mol_type = other DNA
gctgtggctaggtcagggcttggtgtttgcttggcctgtggtcagcttcatggctggtttgagaccaggtcctagttctgtggtgggggttgtgacttaatttgtggcca

SEQ ID NO: 68015 - DNA, 110 bp, synthetic construct
  source 1..110: mol_type = other DNA
ggtttgagaccaggtcctagttctgtggtgggggttgtgacttaatttgtggccagctccaggttcaggctgtggctgaggtcaaggtcaggccatggctggtctcagga

SEQ ID NO: 68016 - DNA, 110 bp, synthetic construct
  source 1..110: mol_type = other DNA
gaatagggtcatgcaaagacacatgaacaggaggtggggagaaacaggcaacctgtaacgaggtcctggggcccctggcatatggctgcccaccacccgggaccccctgc

SEQ ID NO: 68017 - DNA, 110 bp, synthetic construct
  source 1..110: mol_type = other DNA
tgggaaaattgccccagttgagagctactgggctagatcatatagaccatcagagacatccctggaggtgggggcataaagatacaggtaggctggaccagtttccttca

SEQ ID NO: 68018 - DNA, 110 bp, synthetic construct
  source 1..110: mol_type = other DNA
gctcttcgccgactgcaaagcattccactcttcttccatcacctcctgcaccagaaggctatttcgagctccccctgacatactgcttccagtctggcgatatctgttca

SEQ ID NO: 68019 - DNA, 110 bp, synthetic construct
  source 1..110: mol_type = other DNA
aggctatttcgagctccccctgacatactgcttccagtctggcgatatctgttcaggagcctgtcccggctgtttctcattctctccaggcatcccttggagaagaataa

SEQ ID NO: 68020 - DNA, 110 bp, synthetic construct
  source 1..110: mol_type = other DNA
ccttggagctgcatggagcacttttcttgcatggcccctactggacccctggacttttcagacttattgctcttggtacatgtggagactcttgtacacatgtccgccag

SEQ ID NO: 68021 - DNA, 110 bp, synthetic construct
  source 1..110: mol_type = other DNA
tttcagacttattgctcttggtacatgtggagactcttgtacacatgtccgccagcctcctaaaacttggtcagtcacatggcagaccctgccctttgtgacctcttgtt

SEQ ID NO: 68022 - DNA, 110 bp, synthetic construct
  source 1..110: mol_type = other DNA
tgcctgggtccacgactcaagctgcggacatgggtttgggcaccagagatgagtaattctacctactgtccccctaccccaaactgctctcctgcatgcaggttgctggt

SEQ ID NO: 68023 - DNA, 110 bp, synthetic construct
  source 1..110: mol_type = other DNA
attaaattcagggtgggaaactcaggcaggctccctggagggagtggagtctgggctgggttttggaggctgggttttcagttggtgaccagagctgaagagcagggagg

SEQ ID NO: 68024 - DNA, 110 bp, synthetic construct
  source 1..110: mol_type = other DNA
gagatctgaacatttcccagccagtgtttcatccctttaagccattatacttattctaggacttgttgggatgtgcatgtgagcattggcccagaactgtgtgcctgaga

SEQ ID NO: 68025 - DNA, 110 bp, synthetic construct
  source 1..110: mol_type = other DNA
attcggccctaaaaagcaaaaagaagatactgcgccaaactatactgggttatgtgtagagaagaagcagattttgctgagtttcccactgcagtgcataattccagcgt

SEQ ID NO: 68026 - DNA, 110 bp, synthetic construct
  source 1..110: mol_type = other DNA
ctctgccacaggtctgctcagctcaagcccaacactcgcaagatacaggtctatccaggcttctctctcctactcctagggcccctgatggttcctgcatcctgaccaat

SEQ ID NO: 68027 - DNA, 110 bp, synthetic construct
  source 1..110: mol_type = other DNA
catgggagtgcaggtctcggtggtgaaagcagggtgcccgttcctggggtggtcctgaacccccgggccaacgggcagctctatgagatgggaagctgcgggcacgcgag

SEQ ID NO: 68028 - DNA, 110 bp, synthetic construct
  source 1..110: mol_type = other DNA
tgaacccccgggccaacgggcagctctatgagatgggaagctgcgggcacgcgagttctctgtgcaacctgcaaggcactcctagccctgcttcctggagcagaaactag

SEQ ID NO: 68029 - DNA, 110 bp, synthetic construct
  source 1..110: mol_type = other DNA
gaattgagggcaaggggttgcctggagcacggcagaggtgctaaaaagagaaagggtgtcaggtgaagttaaggggctggctattctcacctgtgtgtattccgaacctg

SEQ ID NO: 68030 - DNA, 110 bp, synthetic construct
  source 1..110: mol_type = other DNA
gtgtcaggtgaagttaaggggctggctattctcacctgtgtgtattccgaacctggaacgtggcgtctggggggctttgaccctggatttgggtgtgggagagggggagc

SEQ ID NO: 68031 - DNA, 110 bp, synthetic construct
  source 1..110: mol_type = other DNA
cggccttggcagtgggcatggcggcctcctccctttgacacgctggccacctcgccctggctccagctcttcgttaatgcccgaaagtggacccaggaaggaggctgctg

SEQ ID NO: 68032 - DNA, 110 bp, synthetic construct
  source 1..110: mol_type = other DNA
cctggctccagctcttcgttaatgcccgaaagtggacccaggaaggaggctgctgagcaggccaggaggccgccctgggccccatggtttgtgcctggggtgactgctcc

SEQ ID NO: 68033 - DNA, 110 bp, synthetic construct
  source 1..110: mol_type = other DNA
gcagccggggccacgggccgagcgcttctgtcccaagaccagtccttcggtcacgtcatccttgcgtagaacaagctctgtcgatgtaaacctttcttttcttcctctta

SEQ ID NO: 68034 - DNA, 110 bp, synthetic construct
  source 1..110: mol_type = other DNA
tcatccttgcgtagaacaagctctgtcgatgtaaacctttcttttcttcctcttatttttttttagggctgcatctgtggcagttcccagggaagaggtagaataggagc

SEQ ID NO: 68035 - DNA, 110 bp, synthetic construct
  source 1..110: mol_type = other DNA
aaaaaagcataaatgatgtttgtggtagctatagcaactgcaaaatgatatgcaaagatctggatttctgctggtgacccagtcacaggcactcctaatgtgactctggt

SEQ ID NO: 68036 - DNA, 110 bp, synthetic construct
  source 1..110: mol_type = other DNA
catacttaccagatgacctggtttatttgagaaggatgtggctcaggaatagcatgatgggagatgcctagagcgaggtatgtgggaaggggtgcagagcttccacaccc

SEQ ID NO: 68037 - DNA, 110 bp, synthetic construct
  source 1..110: mol_type = other DNA
aacttctgttttgactgaattgtcactttccaacttcccatgtgtgggagcccaaagctccatgagtcagcataagagacgtttggaccataataatggtggtagaaagt

SEQ ID NO: 68038 - DNA, 110 bp, synthetic construct
  source 1..110: mol_type = other DNA
gttatgcaggtgtttcatgcctgtgtgattgacctccaagaaaaaccttgaatgcaaaggctcaggtcagctcccctggctggcagtacttcacatgtgctctcacacgt

SEQ ID NO: 68039 - DNA, 110 bp, synthetic construct
  source 1..110: mol_type = other DNA
aaaggctcaggtcagctcccctggctggcagtacttcacatgtgctctcacacgtcattacagggagggctgtgtcctttctgtgctgctctactgagaggggacaatca

SEQ ID NO: 68040 - DNA, 110 bp, synthetic construct
  source 1..110: mol_type = other DNA
atcctgcaagttcctttaaagcatgtccttgcttaaaacctttcacgttcaccgtcgaagattctagtagatgctttaccacctggccgccacctaccctcatcatcatc

SEQ ID NO: 68041 - DNA, 110 bp, synthetic construct
  source 1..110: mol_type = other DNA
actctcatcttccctcccgagtaatcgcatgcctgcttcctgagtcatctgaaggcagctctgcctcctcctgtctctgttggtctacagtgtttagtgctttggaaaaa

SEQ ID NO: 68042 - DNA, 110 bp, synthetic construct
  source 1..110: mol_type = other DNA
cgtgcctggacagggggtgtgatgtccgagcatctcacagtctggcccacggcccttggggtctctccatggattgcttcttccccagctttaccttccccttcgaggcc

SEQ ID NO: 68043 - DNA, 110 bp, synthetic construct
  source 1..110: mol_type = other DNA
atccgtgagctgtctccctctccccggttctgtttttcaggaaataccagcttcttctttccagttgctcaggatataaactttggagttttatatctttctatttgcca

SEQ ID NO: 68044 - DNA, 110 bp, synthetic construct
  source 1..110: mol_type = other DNA
tgaaacctggacacctgtaattttacagcattagctaagttgtgtgagaacagtaagtttggggaaccctaccctttcgaggttgtgcagaaagatttgagcctggtgct

SEQ ID NO: 68045 - DNA, 110 bp, synthetic construct
  source 1..110: mol_type = other DNA
gctctatggccccgtgtacaagggctctttcgggatgtttgcctcaccaggacgctggaaaagggaacagcttaccgtgcccatcccagagctccctgaagacagcttca

SEQ ID NO: 68046 - DNA, 110 bp, synthetic construct
  source 1..110: mol_type = other DNA
tcccaggaatgaggactttcccaggatgcagagcttccgtttgtttgtttgttcgtttttccagagacatacacgatttattgggtagggaatcttacaagtcctaagca

SEQ ID NO: 68047 - DNA, 110 bp, synthetic construct
  source 1..110: mol_type = other DNA
cggggtggggggacgcgaggaaacagacaaggccgactgggagctgatgcctgcgatgcctgtttggttctgcagtcaaatgaattccacgtcagccgagcccaccttac

SEQ ID NO: 68048 - DNA, 110 bp, synthetic construct
  source 1..110: mol_type = other DNA
taagcggttcttctgctccatgtgatggcaactggctcatttggatgtattcatcctgcagctcagctggggccagaacggccaacttcactcgcatgcctgggtcctca

SEQ ID NO: 68049 - DNA, 110 bp, synthetic construct
  source 1..110: mol_type = other DNA
agaagggatgtgtctcagagacaacaggctgcgggaaagaagtcagagcacctacacggtgaccccacgcagacaaagctgcgggacaggtgcaactagtccatgatgaa

SEQ ID NO: 68050 - DNA, 110 bp, synthetic construct
  source 1..110: mol_type = other DNA
acggtgaccccacgcagacaaagctgcgggacaggtgcaactagtccatgatgaaaaaaaactgtcacctcaaatttggggctggaacatgggggtgtgactacctggga

SEQ ID NO: 68051 - DNA, 110 bp, synthetic construct; identical to SEQ ID NO: 68049
  source 1..110: mol_type = other DNA

SEQ ID NO: 68052 - DNA, 110 bp, synthetic construct; identical to SEQ ID NO: 68050
  source 1..110: mol_type = other DNA

SEQ ID NO: 68053 - DNA, 110 bp, synthetic construct
  source 1..110: mol_type = other DNA
tgggtacatttttcatgtgtgttctcaggggcgagagtcgggcaggtccagccggagctcaccctgcatgtggcctgtgctcgctcctccttctgcctccaccctcccca

SEQ ID NO: 68054 - DNA, 110 bp, synthetic construct
  source 1..110: mol_type = other DNA
atcgactctaataaaagtttttttgaaaaagggatcctttctttttgtaaaatatgttaataacgtagatgctgaatgacttttacagagaagaactctgtctgtgttca

SEQ ID NO: 68055 - DNA, 110 bp, synthetic construct
  source 1..110: mol_type = other DNA
gtcaaaacttttaaattaatttggaatgttccgggtgtctaggcaaatggttgaactgaattattttgatggtggccgttaactttgaaaacagaccacactgggagaag

SEQ ID NO: 68056 - DNA, 110 bp, synthetic construct
  source 1..110: mol_type = other DNA
cccccatcccgcctgcttggagctccggcgagcaaactcggaggctttcttggcgtctctttcctgcacattcctcatgtccaatccatcatgagtcctgtcaagcaact

SEQ ID NO: 68057 - DNA, 110 bp, synthetic construct
  source 1..110: mol_type = other DNA
taggtgctcaaaactcaggcacctactcagctcctcctctgtgaaaacggaaatactgctacctacctaccttgcaggtatcgtgagtaagcaaaggacttgaaataagg

SEQ ID NO: 68058 - DNA, 110 bp, synthetic construct
  source 1..110: mol_type = other DNA
tctgaaaagctcagccaagggggccaactatgaaagtttcctttccatcaacaaaccagtggcactgtccttaacaaatgacggtggattcattcctcggctcagtttca

SEQ ID NO: 68059 - DNA, 110 bp, synthetic construct
  source 1..110: mol_type = other DNA
ccagtggcactgtccttaacaaatgacggtggattcattcctcggctcagtttcacgtatgccattcagtcagttaatgaacactcttttggtacccgctgtgtgccggc

SEQ ID NO: 68060 - DNA, 110 bp, synthetic construct
  source 1..110: mol_type = other DNA
atggggagcaagtttgcagggagagggtggttgcaagacacagaactaaggcccaggagcaaatacctggcgacatccttttcagctctccagggactgagcattctctt

SEQ ID NO: 68061 - DNA, 110 bp, synthetic construct
  source 1..110: mol_type = other DNA
tggagtcacatcaaggaagtgacagcatcacctccccgcccaaaccctggtgtaatgaactcagtgcaagcaaccaggagtacgcagtgaagacagacagcagagaccag

SEQ ID NO: 68062 - DNA, 110 bp, synthetic construct
  source 1..110: mol_type = other DNA
gggcttgtgctgttttttgcaagcagataatcagcaaacaagtcccagtgaacactcactgagctcttcaggaaacagcctcggaagagaggatggggttgctttccaga

SEQ ID NO: 68063 - DNA, 110 bp, synthetic construct
  source 1..110: mol_type = other DNA
tcactgagctcttcaggaaacagcctcggaagagaggatggggttgctttccagaacaagcctaactttagaagggtccagacgtggaacggaggccatgggtctgtttc

SEQ ID NO: 68064 - DNA, 110 bp, synthetic construct
  source 1..110: mol_type = other DNA
ttctatctttctaccgtctggaatcattcagataaatacaggcactattccaccgcactgatctcagctgcgagaccatttgagcctcgtttcttttcaatagcagctct

SEQ ID NO: 68065 - DNA, 110 bp, synthetic construct
  source 1..110: mol_type = other DNA
gggctggtctggacgcaaatgcagggcccaggcctcagtccctcaactgcccatgagaggaatgtttacagggaggtgggggtgaaggcagaggcagaaacgtgagaaga

SEQ ID NO: 68066 - DNA, 110 bp, synthetic construct
  source 1..110: mol_type = other DNA
atgaggctagaagatggcccttcccagaaactccactttgcagacctgaggaaagcgcgggcactccccagatcctcagccctttctcagcaccacccgccgcccgcctg

SEQ ID NO: 68067 - DNA, 110 bp, synthetic construct
  source 1..110: mol_type = other DNA
ggcccggtggacagccgtccggacgaaccgagacagaactacaccttccgtgaaccactcacattggctaagccgacaagcggaaagatgcagggcatggggaagctcat

SEQ ID NO: 68068 - DNA, 110 bp, synthetic construct
  source 1..110: mol_type = other DNA
cactcacattggctaagccgacaagcggaaagatgcagggcatggggaagctcatcactgcaagtgggaaggatttttttttggggtctttttttaggaccgctcccacg

SEQ ID NO: 68069 - DNA, 110 bp, synthetic construct; identical to SEQ ID NO: 68067
  source 1..110: mol_type = other DNA

SEQ ID NO: 68070 - DNA, 110 bp, synthetic construct; identical to SEQ ID NO: 68068
  source 1..110: mol_type = other DNA

SEQ ID NO: 68071 - DNA, 110 bp, synthetic construct
  source 1..110: mol_type = other DNA
gaaaggaatcatttttgtcagccctactttgcgtcctctaatttcattcctcatatccattctctcccacactgtatgcagattctaaattttggatgaaaaaaatgttg

SEQ ID NO: 68072 - DNA, 110 bp, synthetic construct
  source 1..110: mol_type = other DNA
tccattctctcccacactgtatgcagattctaaattttggatgaaaaaaatgttggaccaagggaactgaagatgccctttctctctggtccttcttccatgaaggacag

SEQ ID NO: 68073 - DNA, 110 bp, synthetic construct
  source 1..110: mol_type = other DNA
ctcagggagcagcttatgccgtaagtcagctctatagaagctgtgttcctgggaatggaatgtacagactaggaaccaaggagcagaagtgggagagatttgctgactca

SEQ ID NO: 68074 - DNA, 110 bp, synthetic construct
  source 1..110: mol_type = other DNA
cagctccgcaaaggtcagtgacctcattcactaggtcgtatccacaaaccatttttctgttggaggtctgtcctcattggcaagaagaagtcaggcagtaaaatttgaac

SEQ ID NO: 68075 - DNA, 110 bp, synthetic construct
  source 1..110: mol_type = other DNA
tgctggagtgaatccccaaacctggttctgcaagctcaagttacatggtggttacatgctggcccttgacccccttggtcccacgccagtgacactgtacctgccaagct

SEQ ID NO: 68076 - DNA, 110 bp, synthetic construct
  source 1..110: mol_type = other DNA
ctgtcctggctgggctgggaggccaggggttcgttcgtgtcacctgtaagcaggatggagaccactgtggcttggcctttggtgtgtgtcaccaaggacaggtgccaggg

SEQ ID NO: 68077 - DNA, 110 bp, synthetic construct
  source 1..110: mol_type = other DNA
tggagaccactgtggcttggcctttggtgtgtgtcaccaaggacaggtgccagggaaacaggaggagctcacaggcatgaaacagcaacatgccctgtggacaacaggtg

SEQ ID NO: 68078 - DNA, 110 bp, synthetic construct
  source 1..110: mol_type = other DNA
aatgagatgtcattaagtcagaagaggccacaaaggaaacgccttgctaatggcgttgcccccagagtagctcctctttttgtttttgtctttccctaaagggaagaaag

SEQ ID NO: 68079 - DNA, 110 bp, synthetic construct
  source 1..110: mol_type = other DNA
tggcagaggtggctctggcagcagggaggcccagagagaggtgaggaagctgtcaggatgaaataaggacctgagtcagggcggcagtggtagagctgtgtgggaggtga

SEQ ID NO: 68080 - DNA, 110 bp, synthetic construct
  source 1..110: mol_type = other DNA
cgtacctgttttcttgttgctggaaatttgaactgctcctcgttttcggctacaaggagtagagctggtgcgggcattcttgtactgcgctctttgtagacctgtgtttt

SEQ ID NO: 68081 - DNA, 110 bp, synthetic construct
  source 1..110: mol_type = other DNA
tcgcggggagcacgcggtcctctccccttcggtttctggcgggccagagcttgccagcagccgtttctgttgcactgactctcaggagcagcgaacgtcagtctgaactt

SEQ ID NO: 68082 - DNA, 110 bp, synthetic construct
  source 1..110: mol_type = other DNA
ggagcatgaagcctcacccggaaaaaggtcaaccgggaacggccagctctgaggcactgctcgtaaaaccaccaccctttaaagggaaagacggaggtcccatcgcggcg

SEQ ID NO: 68083 - DNA, 110 bp, synthetic construct
  source 1..110: mol_type = other DNA
tgccgctgtggtctgaacccactgcaccacagtgggaactcccccttagattctacacaaaaagacttggagatctcaaaggcggggggagaggagcggcagagctccat

SEQ ID NO: 68084 - DNA, 110 bp, synthetic construct
  source 1..110: mol_type = other DNA
cacaaaaagacttggagatctcaaaggcggggggagaggagcggcagagctccatggtggttctgcagcttctctcctgtcagcagtctgttccctctgcttggaggcca

SEQ ID NO: 68085 - DNA, 110 bp, synthetic construct
  source 1..110: mol_type = other DNA
ttttcaaagtagctgtgatggaactgtgcacacggctgagcagtaaagtgagcatgggcaactcaccggggttgggacctttctccaccgtcccggtctcactggcgctg

SEQ ID NO: 68086 - DNA, 110 bp, synthetic construct
  source 1..110: mol_type = other DNA
ccctgtagcaaaccgtccttcggttccctcctttggtgcttctggggtttcgactctcagacaaaaaccaattagtcgtggtcacagttgtcaccaaatgagaggagatt

SEQ ID NO: 68087 - DNA, 110 bp, synthetic construct
  source 1..110: mol_type = other DNA
acatcggtaagtattgttggggctggaaaagaaagcagcagaacgaaaacgctggaggaggagcagcccaggatgctgggctcatggggtcctctccccgcctcccaccc

SEQ ID NO: 68088 - DNA, 110 bp, synthetic construct
  source 1..110: mol_type = other DNA
cctgtagtgatgaacattccaaacaggccacttataagtgttttcttcaagctacaggaactaaacatcgtgcatgaattatttcacgagcagtccagaggtgggcatat

SEQ ID NO: 68089 - DNA, 110 bp, synthetic construct
  source 1..110: mol_type = other DNA
ctgccttgcttctctgggcctcaggacccgccacatgagggggtaggcctgggcctagctcactcgactgtggcgaggggtacgttgatctgtgtaaatccctggtcggg

SEQ ID NO: 68090 - DNA, 110 bp, synthetic construct
  source 1..110: mol_type = other DNA
tagctcactcgactgtggcgaggggtacgttgatctgtgtaaatccctggtcgggagttcttgttgtggctcagtggttagtgagcccgaccggcatccatgaggacgcg

SEQ ID NO: 68091 - DNA, 110 bp, synthetic construct
  source 1..110: mol_type = other DNA
tccctcttggacgcagctcctggggaagcaacagttaccgggcgccaggtcagagcaagctctcagaagttgtactggtaaatcaggcagggagggaggagggtgcggcc

SEQ ID NO: 68092 - DNA, 110 bp, synthetic construct
  source 1..110: mol_type = other DNA
tggcacaggcaggcaggcgcagctcgcattccacccccagcccaggaacttccactgctgaggggcagcggtaaaaaaagaaagagccctacgtgaggcaccacttccct

SEQ ID NO: 68093 - DNA, 110 bp, synthetic construct
  source 1..110: mol_type = other DNA
atcacagcagcaggcatgcaggacgtggaagagaaggacccacctatcccagcaggggctccggattccaccaggtcccccagccagaggggtggcaggacacgtgacag

SEQ ID NO: 68094 - DNA, 110 bp, synthetic construct
  source 1..110: mol_type = other DNA
atgtgtcacaaagagaactggagctgttttacttgaagaagaaaaatcagggtaaagagggcaggaccgcgggttcctcagagatctgaagggctgccctggcctgtgga

SEQ ID NO: 68095 - DNA, 110 bp, synthetic construct
  source 1..110: mol_type = other DNA
gctgggttcctcttgtctttcctgggggtctgtctgtggacttggattgagacgcaatggggggccctctgcccctggtagggtcgcatccgctgtcgcctccatccctg

SEQ ID NO: 68096 - DNA, 110 bp, synthetic construct
  source 1..110: mol_type = other DNA
ggtggcctgccactcttgggcattaaatagctcaacgagctgactgcaggggatatgggacaaagaggcaaggacgcgtgagtggcagagaccccggagaggggccaccg

SEQ ID NO: 68097 - DNA, 110 bp, synthetic construct
  source 1..110: mol_type = other DNA
tagaaatctcaaccaaaaagctgactttgagtcaaataacttttttgttcaaactgccgctatctggagttcccgtcctggcgcagcagaaacaaatcagagtaggaacc

SEQ ID NO: 68098 - DNA, 110 bp, synthetic construct
  source 1..110: mol_type = other DNA
caaaactccatcccctgtagcccttaatcttctaccacaaggtgcccatctgcgctttcctcggctcagaagtgactcccgtgatttgtttttttgccgcgcttctggca

SEQ ID NO: 68099 - DNA, 110 bp, synthetic construct
  source 1..110: mol_type = other DNA
tggcttgaaagctggaaactctcagccaatcaggatccttccagctgggcagtgagctctctcttgaaggaggatctgagtggtgcttctctgagtctgccacaagtaac

SEQ ID NO: 68100 - DNA, 110 bp, synthetic construct
  source 1..110: mol_type = other DNA
gctctctcttgaaggaggatctgagtggtgcttctctgagtctgccacaagtaacttatctttctacagtttttcaaaaaaattttttcttcaaagcttcattgcaaaat

SEQ ID NO: 68101 - DNA, 110 bp, synthetic construct
  source 1..110: mol_type = other DNA
atactgggcttatccccttatgtaggaatatatttcctggtttcaggtgcaatgagtagtcttatctctgcttaaagtgagtaccgcatgacacctgaccattcccactg

SEQ ID NO: 68102 - DNA, 110 bp, synthetic construct
  source 1..110: mol_type = other DNA
gtagtcttatctctgcttaaagtgagtaccgcatgacacctgaccattcccactgtcacatctgtccttccactatagcacaagggtggtgcacataggcaaattatcct

SEQ ID NO: 68103 - DNA, 110 bp, synthetic construct
  source 1..110: mol_type = other DNA
caaggtttgatcttcgacttccagccttcaaaattgacagaaatacatttatacttttcataagccactcaatctatggtatttttttatagcagcccaaatctactagg

SEQ ID NO: 68104 - DNA, 110 bp, synthetic construct
  source 1..110: mol_type = other DNA
ttccactctcattttatttttatttctctttttatgttttagcctccctcctgttctttgtccatggccaattcctccctagacaccctcttcgatgtgtcaggtgtata

SEQ ID NO: 68105 - DNA, 110 bp, synthetic construct
  source 1..110: mol_type = other DNA
ctttgtccatggccaattcctccctagacaccctcttcgatgtgtcaggtgtatatccttgagtatgtatggattcttagaaaatgtaacatgtatctattttgggggtg

SEQ ID NO: 68106 - DNA, 110 bp, synthetic construct
  source 1..110: mol_type = other DNA
attgttgataaattgattgatggcttggctcacccattcattcttttgttcatcacacatttgttaagtacctgccaggtacctggaaacccgcctaacaacaaatcttt

SEQ ID NO: 68107 - DNA, 110 bp, synthetic construct
  source 1..110: mol_type = other DNA
agtgaaaaattcgaagctagataaggaagttgtcaaaaacacaggagttagggaagtgaggctattgaggattagctaaacctgtatcataatgcaggtcttgctgaaca

SEQ ID NO: 68108 - DNA, 110 bp, synthetic construct
  source 1..110: mol_type = other DNA
gccatggggccgtgggtgctagaggtgacgatgaaattgtcagtctaatgggttttattagctggtaccgccttgtctgcagtgatactattcttcagaaaggagcccag

SEQ ID NO: 68109 - DNA, 110 bp, synthetic construct
  source 1..110: mol_type = other DNA
tggtaaagagaatttatcttgtaggtttcattggtaaatgaagcttggggatatagatggaacaattttccagaaccttcagtgatcataaaatggacattttaaagaac

SEQ ID NO: 68110 - DNA, 110 bp, synthetic construct
  source 1..110: mol_type = other DNA
ttttccccctggtaattgatttctagtttcatatcattacagtctgagaagattcttgttctctcagaacaagaatttcatcctcttaaatttatttaagacttgttttg

SEQ ID NO: 68111 - DNA, 110 bp, synthetic construct
  source 1..110: mol_type = other DNA
gagaagattcttgttctctcagaacaagaatttcatcctcttaaatttatttaagacttgttttgtggtttaacatataatctatccttgagaacatgtgctcttgagaa

SEQ ID NO: 68112 - DNA, 110 bp, synthetic construct
  source 1..110: mol_type = other DNA
tcatgttcgcctcacattcagtggggatggagacccacaaaacccccagctgctacatgcatggcatctgtcaggtttcctcctcatctaatcatgtctcacacacatct

SEQ ID NO: 68113 - DNA, 110 bp, synthetic construct
  source 1..110: mol_type = other DNA
tgtggtagggatcctggaattctgaactctattccaaatgtgttggggtgtgaagggtagtggaaggcttggagcaggaagtgatttgcattttttttttttttttgtct

SEQ ID NO: 68114 - DNA, 110 bp, synthetic construct
  source 1..110: mol_type = other DNA
ggtttgagatgtgggtgtgttatcatataaagtaggaggtaaaggacatttaagaaaagagtgtagggagttccctttttttttttttttttttttttgctgttgctatt

SEQ ID NO: 68115 - DNA, 110 bp, synthetic construct
  source 1..110: mol_type = other DNA
cctccacccttccatttgttgtgcaaaaagtcggtgtagaaatgtagcttggcaatgggagcctggaagagcagaatagatcttcatgaaaaaaaaaaaaatacagaatt

SEQ ID NO: 68116 - DNA, 110 bp, synthetic construct
  source 1..110: mol_type = other DNA
tgcactggttatgtgttgctgcatcacagaccacctcaaaatgtggtgacttaggctaacaactcttttattatatgtcataattttgagggtcagaaattgaggcaggg

SEQ ID NO: 68117 - DNA, 110 bp, synthetic construct
  source 1..110: mol_type = other DNA
tatttattatggaaatttttaaacatatgtaaaagtagaaagaccttataataacctattccactccccctacccattacatagcttcagtcattattaacttgtggccg

SEQ ID NO: 68118 - DNA, 110 bp, synthetic construct; identical to SEQ ID NO: 68117
  source 1..110: mol_type = other DNA

SEQ ID NO: 68119 - DNA, 110 bp, synthetic construct
  source 1..110: mol_type = other DNA
tcaagtcattctaccccacaatcttgaaggaatccctctctagccttttccacagacacattcttagttttttaaaagtgcttattttttcttgcagtgtatagtatggg

SEQ ID NO: 68120 - DNA, 110 bp, synthetic construct
  source 1..110: mol_type = other DNA
gagaagagaggacaacgggagggggagcctgaaaactacagaaatgtcctcaaccaaattaataactggtttttaaagctaacgaatttcttctctcactctgcttatca

SEQ ID NO: 68121 - DNA, 110 bp, synthetic construct
  source 1..110: mol_type = other DNA
agggcttggtgacagcatgcgtctggtcattaccacactggacagcatgcatatagaatacttttcatcatccaagaaggttttatttgacacactgttcaagaatattt

SEQ ID NO: 68122 - DNA, 110 bp, synthetic construct
  source 1..110: mol_type = other DNA
ttgttcagctagtttgaggttatgtcttttagggatttttaaaatttgtacacccagtttccttatcactcagcctagggcatgttctttcagggaagaggtgaatttat

SEQ ID NO: 68123 - DNA, 110 bp, synthetic construct
  source 1..110: mol_type = other DNA
agtagtgttaatagaatctagctacttcaagaatgaaattatctgcagacattctcctttacatgaccagtaaccaacagtagtagctgctttttttttttttttttttt

SEQ ID NO: 68124 - DNA, 110 bp, synthetic construct
  source 1..110: mol_type = other DNA
cctgaaatgttcctcatgtatgagagatcataaaaatgtgaaagtgcctgtgtataagttcactgtttaggcaacttataactaagttttcacagttacgaaagtaacaa

SEQ ID NO: 68125 - DNA, 110 bp, synthetic construct
  source 1..110: mol_type = other DNA
ttgagattcagaaccattggcctgaaatagaatcatgtggggcacctaggacaattatttgggaacctccgcagagcaattcactttggagaaaatataaaaatgtatgt

SEQ ID NO: 68126 - DNA, 110 bp, synthetic construct
  source 1..110: mol_type = other DNA
cccctgagccacaagaagaactccctaaatgtttttagttaaaggaagtgcatgttatatgcaccagtttaggcaaatatttgtggtcctactcaggaaaagcttccact

SEQ ID NO: 68127 - DNA, 110 bp, synthetic construct
  source 1..110: mol_type = other DNA
caaagattcgtcttgttcaaaatgtgtaatctcaccaataaaaggaggccaaacatataactagagatcatatattcataagcaaccgtttatgcaaattgtcaaattat

SEQ ID NO: 68128 - DNA, 110 bp, synthetic construct
  source 1..110: mol_type = other DNA
gtaaaaacattgttgttgtccatctagtcttttagacatattcataaatgtatattcaatgcctaagagcattgagtctgaactgaatacgtgcaggttcaaattttgtg

SEQ ID NO: 68129 - DNA, 110 bp, synthetic construct
  source 1..110: mol_type = other DNA
tcaatgcctaagagcattgagtctgaactgaatacgtgcaggttcaaattttgtgctcctggtaactatttgatattttattcatattcatgttcctaatagtacactgt

SEQ ID NO: 68130 - DNA, 110 bp, synthetic construct
  source 1..110: mol_type = other DNA
attgaaactcaatatgctgctggactttctggcccaggaagatcatatagtttgaactgaatatgtgcctccttgtcaaaaagatctttgtctcattatcattctccaag

SEQ ID NO: 68131 - DNA, 110 bp, synthetic construct
  source 1..110: mol_type = other DNA
gatataacggagccaattcaagttttctctcagaaccagcgagggcccttctaccccctcttctcccacacacctccggacaagagatcaggcaattctgtcttacttat

SEQ ID NO: 68132 - DNA, 110 bp, synthetic construct
  source 1..110: mol_type = other DNA
gaaaattaacttctcttcttgagctcaaaaatcagcctctttaaagacaataaggcttactgcagatatgtgtcaaatcccatccacatcaaacatccaaatgcttcact

SEQ ID NO: 68133 - DNA, 110 bp, synthetic construct
  source 1..110: mol_type = other DNA
atttttataacttgggactttttactttgaccctacagaacttgacccctgtgttgttggatggtgattgtctcaatatcgcggtctgcagaggttgtatacatccatcc

SEQ ID NO: 68134 - DNA, 110 bp, synthetic construct
  source 1..110: mol_type = other DNA
gttggatggtgattgtctcaatatcgcggtctgcagaggttgtatacatccatccctgtccaaagatcagactccatgaacccactgagtttgtgcctcgtagcaacata

SEQ ID NO: 68135 - DNA, 110 bp, synthetic construct
  source 1..110: mol_type = other DNA
actctaggaacgatggtgtcaagagagcaagcttctggcattcccttgtcttgctccctcaaaactaaggaaaacaagaggtaaaaatggtgggaaagggacctttggtg

SEQ ID NO: 68136 - DNA, 110 bp, synthetic construct
  source 1..110: mol_type = other DNA
tgacctgtatgacatcaagctattacagctattactgaagtttagtttcctcaccaatagatatagataacgataccaggtgttaagacaaaatcttggaagttcccgtc

SEQ ID NO: 68137 - DNA, 110 bp, synthetic construct
  source 1..110: mol_type = other DNA
aagattttacaaagccatcaagcagcaggggagattaaagttagtcttaaggttaaagctgagtatgcatccatggacacacagtttgttgccactgctgccattcatcc

SEQ ID NO: 68138 - DNA, 110 bp, synthetic construct
  source 1..110: mol_type = other DNA
aagctgagtatgcatccatggacacacagtttgttgccactgctgccattcatcctttaaagtaatgcagtataagaaaacactaccagtattttcattcaatgggggtt

SEQ ID NO: 68139 - DNA, 110 bp, synthetic construct
  source 1..110: mol_type = other DNA
gaggccatgcaaaggggaaaaaaaagttacgatcattgagcctcatgattaagccaattttacatttagtttagtgtttaatgaccaaggaagtcaaagacaatgaactg

SEQ ID NO: 68140 - DNA, 110 bp, synthetic construct
  source 1..110: mol_type = other DNA
agtccaggagatgtttaagagctatgtcaaacaattatagtgtgttggccttacttcaattttgatttgaacaaataaactttttataatataaatgagacgacagttgc

SEQ ID NO: 68141 - DNA, 110 bp, synthetic construct
  source 1..110: mol_type = other DNA
cctgtactcaatcccccaatactgagggatggctgtaattctaaaatgtatatctttgtcaatattaacttaaaaccttgaggatggaagacattttaaaatgcatgtaa

SEQ ID NO: 68142 - DNA, 110 bp, synthetic construct
  source 1..110: mol_type = other DNA
acctctgactggaagcagattcttccccaggtgagcctccagatgagatcacagctttacccaaccccttagggcagccttgcaagatcctgaacagaggacctagttaa

SEQ ID NO: 68143 - DNA, 110 bp, synthetic construct
  source 1..110: mol_type = other DNA
gccccacctgggatcactcaccccatctgatatcttgataggcctggagagtccaagattgcctactttcttgatgactgtcaactgggtatctctctgtgtcattgtca

SEQ ID NO: 68144 - DNA, 110 bp, synthetic construct
  source 1..110: mol_type = other DNA
agagctctcaatttcacaaaaggaacaaagcttcatttatagcacaccactgcgcatgatagcatttcatgagtcagtcgatgaggataattaaactgtgtaggtcaagg

SEQ ID NO: 68145 - DNA, 110 bp, synthetic construct
  source 1..110: mol_type = other DNA
gggaacttcccgtatgcagtaggtgcggccttaaaaaggaaaaaaaaagtaaataagaaagttaattttggttagtggtaagtactgtgatgaagtgggtgaaagggcta

SEQ ID NO: 68146 - DNA, 110 bp, synthetic construct
  source 1..110: mol_type = other DNA
tggatgtgtgatttgcagatatcttccccattcagtaagttgtctgttttcttgatggtttctttgctgtgaagaagcttttcagtttgatgtagtcccatttgtttatt

SEQ ID NO: 68147 - DNA, 110 bp, synthetic construct; identical to SEQ ID NO: 68146
  source 1..110: mol_type = other DNA

SEQ ID NO: 68148 - DNA, 110 bp, synthetic construct
  source 1..110: mol_type = other DNA
aagagcattcgagacagaggaaacggacttcaaaggttctggggtagaaagacgttgggcatgtttgaggaagagcagagaagtctgtatgagtgagaagggcccgagtt

SEQ ID NO: 68149 - DNA, 110 bp, synthetic construct
  source 1..110: mol_type = other DNA
aaatctgatgacagctgcaaagccgttgcgctttgggatgggtaaagtgatcaatgaatactggttatttaaggcagtctgaacattttgagttaccagattcaatttat

SEQ ID NO: 68150 - DNA, 110 bp, synthetic construct
  source 1..110: mol_type = other DNA
ttgagagtatcaccgtctgcttcctcttccctaggttttgggacttggcttatccagagaggtcctatgttgttgccggaagtactagttctccctctgtgtcctactac

SEQ ID NO: 68151 - DNA, 110 bp, synthetic construct
  source 1..110: mol_type = other DNA
agagaggtcctatgttgttgccggaagtactagttctccctctgtgtcctactacaggaaaatcattgaaggcaccgaagttgtccaggtataggcagtctttttacttt

SEQ ID NO: 68152 - DNA, 110 bp, synthetic construct; identical to SEQ ID NO: 68150
  source 1..110: mol_type = other DNA

SEQ ID NO: 68153 - DNA, 110 bp, synthetic construct; identical to SEQ ID NO: 68151
  source 1..110: mol_type = other DNA

SEQ ID NO: 68154 - DNA, 110 bp, synthetic construct
  source 1..110: mol_type = other DNA
actggacaagaaagccatttagggaaaaggaccagagacacccctccccccaaattccagacaactgtgtgaaatcacagatgtgctttatttttttcttaaaattcttt

SEQ ID NO: 68155 - DNA, 110 bp, synthetic construct
  source 1..110: mol_type = other DNA
ccacctgtctgcctcacctggctcctccctctcagggttttccttttgtatgtgtgttgggggggagtgagctgaatagccaccggctctccccaccatacctgttctac

SEQ ID NO: 68156 - DNA, 110 bp, synthetic construct
  source 1..110: mol_type = other DNA
agcaatgcatggtgatagttaatgaactaacagatccaaaggagaaatttaaagcacataagcctttttccacttggctgatggggcagtgatgccctggtgtttgaaac

SEQ ID NO: 68157 - DNA, 110 bp, synthetic construct
  source 1..110: mol_type = other DNA
ggtgggcccctgtcttctctcctctgttcctttaagggttgaggaggggcatccttgcctgaagcaggatatccaggcataaaggaagcagcacactgtccctgccagct

SEQ ID NO: 68158 - DNA, 110 bp, synthetic construct
  source 1..110: mol_type = other DNA
ctggaagtaaagcatagtttctacctgcactcaaggacaagggattgtacaagggaccaccttagggtgtgtccaccacacattatttcctttttcttttatggattttc

SEQ ID NO: 68159 - DNA, 110 bp, synthetic construct
  source 1..110: mol_type = other DNA
tgagttcagagggcagactggtcatgccaagaggtcctgccaacactctgtcttcaatcaaggtggccaggactgcctggacagccaggtccaccgtacacttaaaatct

SEQ ID NO: 68160 - DNA, 110 bp, synthetic construct
  source 1..110: mol_type = other DNA
gaaagtggggggaatgttgcatatattcaggaatgagaccacagttgaaataagaagttcctttgtggacgataagtctcccttgcagagagatggttaaaagatcgagc

SEQ ID NO: 68161 - DNA, 110 bp, synthetic construct
  source 1..110: mol_type = other DNA
tgcgttctcattgatgctagtcagattcatttccactgagccacaatcggaactcctcacctctgtcccttttactgagctcttctccaagacagggctttatttttttc

SEQ ID NO: 68162 - DNA, 110 bp, synthetic construct
  source 1..110: mol_type = other DNA
atctggtgaacggctgtgactcatcttcctcaggatcatcctccaaaggtgtagtctgaggtcatgggtgaccctggagctgcacgaagtgagggcgggcatctgtgtgt

SEQ ID NO: 68163 - DNA, 110 bp, synthetic construct
  source 1..110: mol_type = other DNA
caggcgccacagagtgaagccacatcctgccccacatagtcctttgcttctctgtgaccaagaaatgaaacccaggaattcattaaacgctgaatctatggaagcagcag

SEQ ID NO: 68164 - DNA, 110 bp, synthetic construct
  source 1..110: mol_type = other DNA
gcactcagcaaatgtttgggatgaaaacactgaccctcacttgccagctgcaccggggcagctggggtgaggcagggtcaagcccggtggtcgagcagtttggaaagacg

SEQ ID NO: 68165 - DNA, 110 bp, synthetic construct
  source 1..110: mol_type = other DNA
ttaagagggtgtgaatgagggggaggtagactccagctggcccttcagtaacacttcagtctctccaggtatcagcagtctcccttgggctgaaatcattcactcagatt

SEQ ID NO: 68166 - DNA, 110 bp, synthetic construct
  source 1..110: mol_type = other DNA
catagtgagtgtgtggataagcatagagtttggcttgaacttggataaggtgaaagagaaacataagattgcaaaagtaaatcaaaagcgggttgaacaagggatgtttt

SEQ ID NO: 68167 - DNA, 110 bp, synthetic construct
  source 1..110: mol_type = other DNA
gagaaacataagattgcaaaagtaaatcaaaagcgggttgaacaagggatgttttaatgccgccctaaggattttagagtttgttatgtaagaataaatacaactttcag

SEQ ID NO: 68168 - DNA, 110 bp, synthetic construct
  source 1..110: mol_type = other DNA
agcttccatttgccatctcatagaacactttcccttggagccctgaaccattacgtaagaagtcccattactctgagaccaccatgctgaagggcactcacaggtggagt

SEQ ID NO: 68169 - DNA, 110 bp, synthetic construct
  source 1..110: mol_type = other DNA
aggtgagaaggctgcagaaaaaaagtttgaagctggcagagattggttcgtaaggtttaaggaaagaaaccatctctgcaacgtaaatatgcaaggtgaaacagcaagtg

SEQ ID NO: 68170 - DNA, 110 bp, synthetic construct
  source 1..110: mol_type = other DNA
tttaaggaaagaaaccatctctgcaacgtaaatatgcaaggtgaaacagcaagtgcttatttggaagctgcagcaagttatccagagatctagctaggatcattcgttaa

SEQ ID NO: 68171 - DNA, 110 bp, synthetic construct
  source 1..110: mol_type = other DNA
cagcctctctggaggagtcagctcctttacacagtagttctcctcccctctcctgtggagtcagttctcactctctcctgggccatttccaccagcacacattctgggat

SEQ ID NO: 68172 - DNA, 110 bp, synthetic construct
  source 1..110: mol_type = other DNA
catgaatggatgttgaactttatcaaatgctttttcttcatctgttgagatgatcattggtttttgccttatcttttgtggatatgatatgtgacattgattgatttgca

SEQ ID NO: 68173 - DNA, 110 bp, synthetic construct; identical to SEQ ID NO: 68172
  source 1..110: mol_type = other DNA

SEQ ID NO: 68174 - DNA, 110 bp, synthetic construct
  source 1..110: mol_type = other DNA
cttccaaatagacttctctagaagatgctgtgtgtgagggggagggacaacagaatacgcgcctggttctgtggcaaccctcttaaggaagaggagagcaggctgaggac

SEQ ID NO: 68175 - DNA, 110 bp, synthetic construct
  source 1..110: mol_type = other DNA
taaaacacaacaataccttaaatttttgaaaaatatggtatgacatctctcattaaagaatgcaatgggatagaaaagggcaaggaagatacaaattgaagggcacagaa

SEQ ID NO: 68176 - DNA, 110 bp, synthetic construct
  source 1..110: mol_type = other DNA
ttaatttgccccaaatagggagggtgtcttatgtgtagtcatttactatgaacgacaaatgaggtacaagcttggatctcattttccagcagtagtattggactgctttg

SEQ ID NO: 68177 - DNA, 110 bp, synthetic construct
  source 1..110: mol_type = other DNA
gaatattactaatgaagatactgagtttgcagcccagctttgaaggctcatggtgtacacctgccctgctttcttataggttgttccttcatgtggatatttgccagtgt

SEQ ID NO: 68178 - DNA, 110 bp, synthetic construct
  source 1..110: mol_type = other DNA
tacacctgccctgctttcttataggttgttccttcatgtggatatttgccagtgtaggcagcactcaatagcaaggggctgcagaaacagaatgctagctctcatgtcct

SEQ ID NO: 68179 - DNA, 110 bp, synthetic construct
  source 1..110: mol_type = other DNA
tccgagttgggcagcactggtggaatcttttaccacactttattggctagagagcaatggccccctaagctaactgaggcacttgagacacagacccagttcttgtcaaa

SEQ ID NO: 68180 - DNA, 110 bp, synthetic construct
  source 1..110: mol_type = other DNA
ccctgaagggttgttacagaaggcaaacagggtagcagacacaagcttctctgtcccactgcttttccttcccttcaggggtctcaaagaattactaccacactctcccc

SEQ ID NO: 68181 - DNA, 110 bp, synthetic construct
  source 1..110: mol_type = other DNA
tttcatggttccagggcagactgagttaccggtaattaaaaacttagtgtccattgtagcccccacgatgggaattggactgtgcacccaagaacagagacggtttgcct

SEQ ID NO: 68182 - DNA, 110 bp, synthetic construct
  source 1..110: mol_type = other DNA
aaaggaaatggatgctttgtggctagtgaggtggaaggaaaaccacatgaaagctatggcaaggacatgcttcaggaagaagggagggaataaatagaataaatactgct

SEQ ID NO: 68183 - DNA, 110 bp, synthetic construct
  source 1..110: mol_type = other DNA
ggtcaggttcgtaacccactgagccacaatgggaacttcccattatcatttttcttagctagccatgtctgatgtaagcctagctgggcctctgctatgacttagacata

SEQ ID NO: 68184 - DNA, 110 bp, synthetic construct
  source 1..110: mol_type = other DNA
ggataaggtccctgtcttgattgtggtgatggggttttggcttcatacatctgttaaacttaccacattatacattctgaatatgtgctatttattgtatgtgaattgta

SEQ ID NO: 68185 - DNA, 110 bp, synthetic construct
  source 1..110: mol_type = other DNA
aaacttaccacattatacattctgaatatgtgctatttattgtatgtgaattgtactcacatgccttcctgggtggtaaaggaagggtagaatcatagccatgacattag

SEQ ID NO: 68186 - DNA, 110 bp, synthetic construct
  source 1..110: mol_type = other DNA
tctcccttttccttttcctcttggaatcacttctactgattcttggatttatcctcaccccactccaatttgtctctctctggccctgctggccagtacctacttgctag

SEQ ID NO: 68187 - DNA, 110 bp, synthetic construct
  source 1..110: mol_type = other DNA
caccccactccaatttgtctctctctggccctgctggccagtacctacttgctaggttgttccctgcagttactaaataataacaaaccaagactgtagataaggcagtt

SEQ ID NO: 68188 - DNA, 110 bp, synthetic construct
  source 1..110: mol_type = other DNA
aaagagaaatcacacgcacagatcgaaatcaatgggaagacaacatactattataatgccaagatctgcaaaatagcttagcccttggctgtgcacctagaattaagaac

SEQ ID NO: 68189 - DNA, 110 bp, synthetic construct
  source 1..110: mol_type = other DNA
attcccccataaactggcctagtgcaccatcatctcttaagaacactaggatatggtttatttaaaagtagtcccggagctcctgtcgtggctcagtggctggcgaatcc

SEQ ID NO: 68190 - DNA, 110 bp, synthetic construct
  source 1..110: mol_type = other DNA
ttcgttaagcaccgtgccactacaggaactccaattttttgatattgtatatggaatctagcaagcttaatactgttattgtatggcttttatattgaattttttttttg

SEQ ID NO: 68191 - DNA, 110 bp, synthetic construct
  source 1..110: mol_type = other DNA
taattacttgagtcatttctcattgaaaagagaatgggattaaaggcttcatggaatttttattaggttttccagtgtgtttggggccaaagtggagaaattataggtgg

SEQ ID NO: 68192 - DNA, 110 bp, synthetic construct
  source 1..110: mol_type = other DNA
atttttattaggttttccagtgtgtttggggccaaagtggagaaattataggtgggtgtaggatgttggctaaccatgcagaatattcacgccaaaagctgatcgttggg

SEQ ID NO: 68193 - DNA, 110 bp, synthetic construct; identical to SEQ ID NO: 68191
  source 1..110: mol_type = other DNA

SEQ ID NO: 68194 - DNA, 110 bp, synthetic construct; identical to SEQ ID NO: 68192
  source 1..110: mol_type = other DNA

SEQ ID NO: 68195 - DNA, 110 bp, synthetic construct
  source 1..110: mol_type = other DNA
catcttcacccagactttccaaatattgtcaatgacgctttcaaattttccaatcagaagactaaaaatgtgtggagtggctctacagtcctttttttgacacttctcct

SEQ ID NO: 68196 - DNA, 110 bp, synthetic construct
  source 1..110: mol_type = other DNA
ggaatgagatacatagttataactggcttggataaagtatgtttacttccatgggattgaatgcagttttcattttaaaaaagcttgaggattgctagctaggtagctag

SEQ ID NO: 68197 - DNA, 110 bp, synthetic construct
  source 1..110: mol_type = other DNA
attgaatgcagttttcattttaaaaaagcttgaggattgctagctaggtagctagagagaaagctataggagagccttgcaacaatatttgcaaactcccagtcaatcct

SEQ ID NO: 68198 - DNA, 110 bp, synthetic construct
  source 1..110: mol_type = other DNA
ggaagacccatagatacaacacaagggaagatctatgcagcagagagcacatcacttaaagaacagcctcaaatcccagaagtttaaaaggtatactgagtcaaaacact

SEQ ID NO: 68199 - DNA, 110 bp, synthetic construct
  source 1..110: mol_type = other DNA
catttttaggggtaggtttgctagcaatacatctttttagctttactttatccgacaatgccttcattgtcctttgttcttaaggtatattttcaccaaaagcagaattt

SEQ ID NO: 68200 - DNA, 110 bp, synthetic construct
  source 1..110: mol_type = other DNA
aaattttcctgaacagaatttctggtctggaggagctaggagccataattcacggcaggtggtgccattcttctgccgaagtgtggaaaggccaggctccagggtgagca

SEQ ID NO: 68201 - DNA, 110 bp, synthetic construct
  source 1..110: mol_type = other DNA
ttagcaggatgggcagcaggactcttcccccagtttctgaagagttgagtggggcaggggagaggaatagctcttttcctttcaatctggagtagagtgtgtagaatcaa

SEQ ID NO: 68202 - DNA, 110 bp, synthetic construct
  source 1..110: mol_type = other DNA
catcttattttcctgaatgacctttgtacttagagacagaactgtcattatcgagtcttgtcaaggccacaccctgcactaagcaactctcttcttccttccttccttct

SEQ ID NO: 68203 - DNA, 110 bp, synthetic construct
  source 1..110: mol_type = other DNA
gagggacattagaaactctttttcaggagaaacagaaaattccaggaaaatgctattcagaggctgccattttggaagcttcaacaaaagccagctttccagccaatcac

SEQ ID NO: 68204 - DNA, 110 bp, synthetic construct
  source 1..110: mol_type = other DNA
gagtgtataccttggagtggaatttctggatcatacagtaactggtaaattgttttctgtagtggctgcaccattttccatctctacgagtgatatgtgtttcaatttct

SEQ ID NO: 68205 - DNA, 110 bp, synthetic construct
  source 1..110: mol_type = other DNA
cagtaactggtaaattgttttctgtagtggctgcaccattttccatctctacgagtgatatgtgtttcaatttctctatttgctcactgacacttattattttagttttt

SEQ ID NO: 68206 - DNA, 110 bp, synthetic construct
  source 1..110: mol_type = other DNA
ctacctcctctcccctccacaccttagtcttctccagatgtgtaacctaacagattaaaaaagttcatcacagctctttttgcttctctgccccctaaagaaatttcttt

SEQ ID NO: 68207 - DNA, 110 bp, synthetic construct
  source 1..110: mol_type = other DNA
ccaggaagccccagctagacactcgatccacaatcacctctatcaatacttaagccagacaagccagcatcactaattgatgtcaaagcaaacaagaatgtacatgagtc

SEQ ID NO: 68208 - DNA, 110 bp, synthetic construct
  source 1..110: mol_type = other DNA
cagacaagccagcatcactaattgatgtcaaagcaaacaagaatgtacatgagtctaaaattttcaaactattcccaaattcctagccaggcagctgcacaggctcaccc

SEQ ID NO: 68209 - DNA, 110 bp, synthetic construct
  source 1..110: mol_type = other DNA
cagagtactggcctttgctgcttatagagggtaccctgatggaaaccaaaaaacatcactatgtgtacatcaggggcaatatatatatagagagagaagggaatcatata

SEQ ID NO: 68210 - DNA, 110 bp, synthetic construct
  source 1..110: mol_type = other DNA
tactttcttatggccacgctagcaaactaacacaggcatgtagacagagctagttatcacacacgcacacagcataactacatcaagttaattactccagtagttatctg

SEQ ID NO: 68211 - DNA, 110 bp, synthetic construct
  source 1..110: mol_type = other DNA
atcacacacgcacacagcataactacatcaagttaattactccagtagttatctgaaagccaaagattccaatcagagcaaatactgttacacatatgactcaagcaatt

SEQ ID NO: 68212 - DNA, 110 bp, synthetic construct
  source 1..110: mol_type = other DNA
tttatttatgtagattttcttttgatgtttgacttccttttgctctaagctatgtttgaaacgggtaacacaatgcatggcccacagaattaaccttttcaccacagaag

SEQ ID NO: 68213 - DNA, 110 bp, synthetic construct
  source 1..110: mol_type = other DNA
tccatgagacacaagtctacaggttaacatgtaacttcacagagtcccggccagccatgatcaacagtggcagtaaaacaaaactgcagtaccctaaataattaaataat

SEQ ID NO: 68214 - DNA, 110 bp, synthetic construct
  source 1..110: mol_type = other DNA
catgatcaacagtggcagtaaaacaaaactgcagtaccctaaataattaaataatccttgtccgggtttgttcaacaacgcttaggtatgaaactgtgagcagatggctt

SEQ ID NO: 68215 - DNA, 110 bp, synthetic construct
  source 1..110: mol_type = other DNA
tagcaaaattttgaatgaagcggaggccctacagaagcaatagtaccactggccttgactttcagatttaatctacctccctatgtataatataatcagtgggtactgga

SEQ ID NO: 68216 - DNA, 110 bp, synthetic construct
  source 1..110: mol_type = other DNA
tgactttcagatttaatctacctccctatgtataatataatcagtgggtactggagctagttcacatcggcttgtcagttttcaggaaatatgtaagccagattaaataa

SEQ ID NO: 68217 - DNA, 110 bp, synthetic construct
  source 1..110: mol_type = other DNA
ctatgtagatactgacagtgggattcgggggtcacttatttaatttccttgtatcttattttctcatctgcagaatgggactaatacctgcatatacatcgcaggattgt

SEQ ID NO: 68218 - DNA, 110 bp, synthetic construct
  source 1..110: mol_type = other DNA
gttcttatacagcccacaagctgaggatggtttttccatttttaaaagtttgtgaaaattaaaaaagaagaatatatgacagagactctacgtggccccccaaaccgaaa

SEQ ID NO: 68219 - DNA, 110 bp, synthetic construct
  source 1..110: mol_type = other DNA
ctgtgccctccttcccctgcaccccctatcaccagtggggtcctgaaggagtgggaggtgaatgtgtgttctcagtttgccagcttacccattcagttttaaggtgcctg

SEQ ID NO: 68220 - DNA, 110 bp, synthetic construct
  source 1..110: mol_type = other DNA
aggtgaatgtgtgttctcagtttgccagcttacccattcagttttaaggtgcctgatttatttataattttgtgtgaaatccataaagggtgttctatatcagactctga

SEQ ID NO: 68221 - DNA, 110 bp, synthetic construct
  source 1..110: mol_type = other DNA
gtctggatcccattctcttagaaaacacagctgagtgtggtcagtgtatagtcatcttcatttttgtcattgagaaaaaagctgttagggttgttacacttggagaagag

SEQ ID NO: 68222 - DNA, 110 bp, synthetic construct
  source 1..110: mol_type = other DNA
tcttccctgtggagcaggaactgtgaatgtgtttgtgtgtgaataggaattaatcctgccatgtagcatcgatcttctacagccctgatctagcaatgggaatcaggaac

SEQ ID NO: 68223 - DNA, 110 bp, synthetic construct
  source 1..110: mol_type = other DNA
tattcatttttcactgagcttagtaaaattataaataatatgcctagaggggttgggggtctgaggagcaaaggctcaagcagactgaattgggacactttagcttgagt

SEQ ID NO: 68224 - DNA, 110 bp, synthetic construct
  source 1..110: mol_type = other DNA
ggggtctgaggagcaaaggctcaagcagactgaattgggacactttagcttgagtgtgtgtatcacaacagatccagttaaaatacccctatcctcaatctccccacact

SEQ ID NO: 68225 - DNA, 110 bp, synthetic construct
  source 1..110: mol_type = other DNA
ttactgtcattatcagctttcgagctttgaggtgtttatttgctttaaaacgtttttctaaattgtgcgtagaagcagtttgtcagaaatattttttgagatgttttctt

SEQ ID NO: 68226 - DNA, 110 bp, synthetic construct
  source 1..110: mol_type = other DNA
cacacacacacacacacacacacacacacacactgctgatgaagggttgatctgtttggatttctactatttacatatgtaggaatcactcactacccgtttctaggaag

SEQ ID NO: 68227 - DNA, 110 bp, synthetic construct
  source 1..110: mol_type = other DNA
ttggatttctactatttacatatgtaggaatcactcactacccgtttctaggaaggaatttaaagagtctgccagtattaatttgcatattttcttggcaaatgtttagg

SEQ ID NO: 68228 - DNA, 110 bp, synthetic construct
  source 1..110: mol_type = other DNA
caaatgaaaaataatgctttggcagctccacaccctcctgtaggcctctggtgtcataaagatgtaactgctcctttactccgcgatccgtttccactgaggccatatac

SEQ ID NO: 68229 - DNA, 110 bp, synthetic construct
  source 1..110: mol_type = other DNA
ataaagatgtaactgctcctttactccgcgatccgtttccactgaggccatatacacatcttccattgtttcacagtcttccattcctgggagtaaaaagaattttacat

SEQ ID NO: 68230 - DNA, 110 bp, synthetic construct; identical to SEQ ID NO: 68228
  source 1..110: mol_type = other DNA

SEQ ID NO: 68231 - DNA, 110 bp, synthetic construct; identical to SEQ ID NO: 68229
  source 1..110: mol_type = other DNA

SEQ ID NO: 68232 - DNA, 110 bp, synthetic construct
  source 1..110: mol_type = other DNA
cctaatcattttagttgaaaggcactttagtctcttacttgtgccctctccgggtggttgatttcattgaactataaccagggcagcttctgtggaaatttatcattgca

SEQ ID NO: 68233 - DNA, 110 bp, synthetic construct
  source 1..110: mol_type = other DNA
agggtctttggtgaagctcctcctgtgcctgagctgctcctgtcccaatccttatacaaccgcctcctactgtaccaagaaagtgaccaggatccaacttcctctccctt

SEQ ID NO: 68234 - DNA, 110 bp, synthetic construct
  source 1..110: mol_type = other DNA
acaaccgcctcctactgtaccaagaaagtgaccaggatccaacttcctctcccttttttttattattattattattttttttggtctttttgtctttgttgttgttgttg

SEQ ID NO: 68235 - DNA, 110 bp, synthetic construct
  source 1..110: mol_type = other DNA
aggtttcgctattctgctcttgttccctcctaatctcgtctcaacaaggaagtcggaggatataattcagctcatggcagcctctgcttcaaacctcgccatggctccta

SEQ ID NO: 68236 - DNA, 110 bp, synthetic construct
  source 1..110: mol_type = other DNA
aaattctcaagaagaaatctgttttttgtacacttgttctatgtgtatacagataggcagtatagaagggtggtttgaattttagtttttaggtttccatcatttgtttc

SEQ ID NO: 68237 - DNA, 110 bp, synthetic construct
  source 1..110: mol_type = other DNA
cagttgtctcccactgctctctctgccagccttcacaaagtcaagttctggacttattgaagaaagtgattcatctctctatggaaggaatgccaaaaccaactctataa

SEQ ID NO: 68238 - DNA, 110 bp, synthetic construct
  source 1..110: mol_type = other DNA
attgaagaaagtgattcatctctctatggaaggaatgccaaaaccaactctataaaagatttctttcttcacatctttaattcctgaggaccttacagtcacttgatata

SEQ ID NO: 68239 - DNA, 110 bp, synthetic construct
  source 1..110: mol_type = other DNA
taggtgtgacccatcccatgtgtttggtgaagatttgagtctggccctagagatgcacagctgttacaactggccaagaagaaattttgcaactgagcagcaccgagagg

SEQ ID NO: 68240 - DNA, 110 bp, synthetic construct
  source 1..110: mol_type = other DNA
gcttccctgtatctccttccccctttgcacgttacctctgtcaaaatgcttgttgctattgtgtgaccttggcttttctttgaggcttcattctaactgaattatcacat

SEQ ID NO: 68241 - DNA, 110 bp, synthetic construct
  source 1..110: mol_type = other DNA
ggcatgaatgaatgagtcagtgagaatgttcttctgagggacagatgtttttattttgtgggtcatgatgggaacacagggaagagagaggagatagttcagcctccagg

SEQ ID NO: 68242 - DNA, 110 bp, synthetic construct
  source 1..110: mol_type = other DNA
ttgtgggtcatgatgggaacacagggaagagagaggagatagttcagcctccaggggcagcatcatttattcagaatagtgagaaaagtcagtaccatgttccacactag

SEQ ID NO: 68243 - DNA, 110 bp, synthetic construct
  source 1..110: mol_type = other DNA
gttcaattcaccaaaccaatttccaccaggacctttactctcagtggagaaaaacaataaatgattctgtcactaggcttttttaaatttatttttattttttctttttc

SEQ ID NO: 68244 - DNA, 110 bp, synthetic construct
  source 1..110: mol_type = other DNA
agggaccgaattaatttgtgaagaataactctgcaattagtgagccaatgctctgattcttagtgcaactgggctaagaaatgatacatttcagatgccctgattctggt

SEQ ID NO: 68245 - DNA, 110 bp, synthetic construct
  source 1..110: mol_type = other DNA
cgcagggagagtaagagtttagcacagtggctgttctgtgcatttgttcatcatattatctccttgtgcccagttttgtggatgtcacaatatatgatggagtgacctga

SEQ ID NO: 68246 - DNA, 110 bp, synthetic construct
  source 1..110: mol_type = other DNA
gcaaatgaatttttcccaaaacaccagaggtgatgtgcaccatcacaaatatcaagaaaatggtctagctccttatatttccatcaccaaaacccctctattcctttttt

SEQ ID NO: 68247 - DNA, 110 bp, synthetic construct
  source 1..110: mol_type = other DNA
tattcaaagttaacattttgaggcagtgtttttgtcctgcacagttgttttattttgaccagctttccttatgttttcctaaggcaaagaacaagaatacctttaacagc

SEQ ID NO: 68248 - DNA, 110 bp, synthetic construct
  source 1..110: mol_type = other DNA
agtcaggaaattaaagtctagattccccaccagcagaatgatcagaccaataactgaaacagtacactggagaaagaaaggatattataatcagttcatgtaaccctgca

SEQ ID NO: 68249 - DNA, 110 bp, synthetic construct
  source 1..110: mol_type = other DNA
tatgaattaaatacctctggacccatttctcctcgggccactctccaggccacggacccagatatccttccgccaagttctccaggcttagggcttcggggagatataaa

SEQ ID NO: 68250 - DNA, 110 bp, synthetic construct
  source 1..110: mol_type = other DNA
agttctgagtgttggagggtaagtaggatttctgatgtggaatcctggacactgataggctacgacgggagacattctctcagtgtcgcaatcagcaacacatttgtttt

SEQ ID NO: 68251 - DNA, 110 bp, synthetic construct
  source 1..110: mol_type = other DNA
attcagttccaatcactccttctctgtgtttctccattccaaactttaaattcctcagggagcaaatctgaccaacacagcttagatcagatgtccaactgccatagcca

SEQ ID NO: 68252 - DNA, 110 bp, synthetic construct
  source 1..110: mol_type = other DNA
cagggagcaaatctgaccaacacagcttagatcagatgtccaactgccatagccaaagggcaggatcatccagtaaagccattgctgctacaatttcactcctctatgct

SEQ ID NO: 68253 - DNA, 110 bp, synthetic construct
  source 1..110: mol_type = other DNA
gatgtggctcagatctggtgtggctatggcgtgggcttcagctgaatttccaacttgacccctaggttgggagcttccttatgctgcgggggtggccgaaaaaagaaaaa

SEQ ID NO: 68254 - DNA, 110 bp, synthetic construct
  source 1..110: mol_type = other DNA
agttacatgcaagtctaagaatgctagtctgttatttctcctatattatagagtactacacagaatattacaccaaaggctaataccactgactgatgaacatactgaat

SEQ ID NO: 68255 - DNA, 110 bp, synthetic construct
  source 1..110: mol_type = other DNA
tgtatatggttactgtagccaaagcttatcttcccaagatttcaggagtatacccttccaaagtgctgccctgccatgccatcaataacagtgtttgatcatctgtgtca

SEQ ID NO: 68256 - DNA, 110 bp, synthetic construct
  source 1..110: mol_type = other DNA
ggttcagtggtaatgaacctgacgagtaaccatgagggtgcggttcgatcccttgccttgcttggtgggttaagaatctgtcatttccacaaggtgaggtataggttgca

SEQ ID NO: 68257 - DNA, 110 bp, synthetic construct
  source 1..110: mol_type = other DNA
aacctgacgagtaaccatgagggtgcggttcgatcccttgccttgcttggtgggttaagaatctgtcatttccacaaggtgaggtataggttgcagatgcagcttggatc

SEQ ID NO: 68258 - DNA, 110 bp, synthetic construct
  source 1..110: mol_type = other DNA
acagcgttacatgtcaattacatctcagtaaagctgagaaaaaaagaaagcaaaatttagcactttccttcatttattgccatctcaataatcagtcctgcttttcatga

SEQ ID NO: 68259 - DNA, 110 bp, synthetic construct
  source 1..110: mol_type = other DNA
tttagcactttccttcatttattgccatctcaataatcagtcctgcttttcatgaaaagcctaaaagatccaaatgacctggaagcaaaatcccctaccaagatgcaaat

SEQ ID NO: 68260 - DNA, 110 bp, synthetic construct
  source 1..110: mol_type = other DNA
tcctgtgtcacagaagtgtctgttggtatcaggtttctgttgccgggatggccagtgacagacagttatgctagatgtgaacagaatacagttgtactctcaccgtaact

SEQ ID NO: 68261 - DNA, 110 bp, synthetic construct
  source 1..110: mol_type = other DNA
gtgtgctggcataaggaagaagggaaaaatatttattgagagctggtgacctatttggttttctcgttccatcctgtttgtccggaaaaacaaatacttatctctgaaca

SEQ ID NO: 68262 - DNA, 110 bp, synthetic construct
  source 1..110: mol_type = other DNA
tggttttctcgttccatcctgtttgtccggaaaaacaaatacttatctctgaacatctagcctgaagaatacagtagaaagagattaaccaattcctggtttatttattt

SEQ ID NO: 68263 - DNA, 110 bp, synthetic construct
  source 1..110: mol_type = other DNA
tgtatcaaattttctgctgacttctttgcaggaactggtaagctcatctttaatttcatgtggaaattgaagggatccagaatagccgaaacagtcctgaaaaagaacaa

SEQ ID NO: 68264 - DNA, 110 bp, synthetic construct
  source 1..110: mol_type = other DNA
tcatgtggaaattgaagggatccagaatagccgaaacagtcctgaaaaagaacaaagtttgaaggactcatacttcataatttcaaaacttaactataaaattatagtaa

SEQ ID NO: 68265 - DNA, 110 bp, synthetic construct
  source 1..110: mol_type = other DNA
ttatctcctcctactattacattgtttatagctcattgtgggagcttatgaagaatggatgatggtgggatgctgttctggaacatacaactagaggaaagcattaacaa

SEQ ID NO: 68266 - DNA, 110 bp, synthetic construct
  source 1..110: mol_type = other DNA
cttcagtgtttcttccagcagctgctaccgtgacctgctttgggtgggctctctttggctccacctgggtgcccccctcaggcctgtacctgaacctttctattgacact

SEQ ID NO: 68267 - DNA, 110 bp, synthetic construct
  source 1..110: mol_type = other DNA
gtagctgcatttccaaatttctcagtctaaatctcagctttatctagagagtggagaatcattggcaaaaagtgaataaaagtgaagtcatttgactgaccagcctgaca

SEQ ID NO: 68268 - DNA, 110 bp, synthetic construct
  source 1..110: mol_type = other DNA
atggcaagtgccaatctccagttcacactctgttcatctgatattaacacctccgtgttagctgtgatatagtctcacccagggtaggtgacttcttcacttctgcctta

SEQ ID NO: 68269 - DNA, 110 bp, synthetic construct
  source 1..110: mol_type = other DNA
gaatcaatttcacagagcatcatttgaagatttagtgggtagctccaaggtgtggggggcccaggacttgaactgctgtggcagagtgtaggatacctactgccagagac

SEQ ID NO: 68270 - DNA, 110 bp, synthetic construct
  source 1..110: mol_type = other DNA
ctagttacctcctaccttaacttgatcatttaaatggaaagtgccacagctccgacagagcagacatgatataaaaactctttctgacatgactatcttgcctcctgaat

SEQ ID NO: 68271 - DNA, 110 bp, synthetic construct
  source 1..110: mol_type = other DNA
ttggaaatcctgttacctaacacagctagccttacatccaggggctttgcgagcatttctagtctccagtaagagtgagaggcattttcatttgtcttttgtttgtttgt

SEQ ID NO: 68272 - DNA, 110 bp, synthetic construct
  source 1..110: mol_type = other DNA
atccaggggctttgcgagcatttctagtctccagtaagagtgagaggcattttcatttgtcttttgtttgtttgttttatttacatttgtttctgatttttacttcatga

SEQ ID NO: 68273 - DNA, 110 bp, synthetic construct
  source 1..110: mol_type = other DNA
gactccttcagaagctgggaatcagggcacccatctgataaaaatcttagcccctttttttcatcacaaggccctgtgaccaccaccatgtacccttaatgcattattct

SEQ ID NO: 68274 - DNA, 110 bp, synthetic construct
  source 1..110: mol_type = other DNA
atcttgatcattttatctaaaatctcttagaatcatattctcctcttcagtgttcagggaggtgttcagggagacagctagatgggctgtgaagtcctgtcacagttcta

SEQ ID NO: 68275 - DNA, 110 bp, synthetic construct
  source 1..110: mol_type = other DNA
tctgattggccacagcatatgccattctggtggtgaaatgtttctagcgtcacctctagttcaggagttattgttactttaatatcgctatgactctcatgacattccac

SEQ ID NO: 68276 - DNA, 110 bp, synthetic construct
  source 1..110: mol_type = other DNA
ctagttcaggagttattgttactttaatatcgctatgactctcatgacattccactagccagatattccataacatctggaatattcccagttctttacttcaggcaaaa

SEQ ID NO: 68277 - DNA, 110 bp, synthetic construct
  source 1..110: mol_type = other DNA
ctttaaatttcttatcaatattgttctctgagatgccttaaagcaacttataatctgttatcaaaagcagctcaacattctaagaaaactctgttctcctaacagggaga

SEQ ID NO: 68278 - DNA, 110 bp, synthetic construct
  source 1..110: mol_type = other DNA
tgttatcaaaagcagctcaacattctaagaaaactctgttctcctaacagggagaaataaaaccaaactcaagtttcataccagtttgctattaatagcaaatttcatgt

SEQ ID NO: 68279 - DNA, 110 bp, synthetic construct
  source 1..110: mol_type = other DNA
atactggagaggagggactagcagagggctggaagctgagaccaaatcacctcgcaatgtgtagactttacaaaatgcaaccagtcaatgcctggacttcactcagacta

SEQ ID NO: 68280 - DNA, 110 bp, synthetic construct
  source 1..110: mol_type = other DNA
tagggtcagcagagggagattgtgaatctaagttcaaaatgttcatggagataaaagctggtcttaaaaatgtcatgaagaatcaagagaatttccatatgtgaaaaata

SEQ ID NO: 68281 - DNA, 110 bp, synthetic construct
  source 1..110: mol_type = other DNA
ctgactttccctcccagcttcaggccctgatgtccccaggataggctgagctcgcttccaccaaaggaagccctcaggctgggagtctctagtatttgtagaaagcatga

SEQ ID NO: 68282 - DNA, 110 bp, synthetic construct
  source 1..110: mol_type = other DNA
agactcttttgtagtgaaaaggtaagagttagtgggagaaataagaaagttaattagttttctgttgttaaacctgttcacttataattgctggccttatctttcttctt

SEQ ID NO: 68283 - DNA, 110 bp, synthetic construct
  source 1..110: mol_type = other DNA
attggtctggatcggacctggaagctattctcagtgaaaaactggagttgtcagttgtgctgtaggttgatgtagtgatctgggaatcagcaaatttttaaaggtaggtg

SEQ ID NO: 68284 - DNA, 110 bp, synthetic construct
  source 1..110: mol_type = other DNA
aggaatgcccttcctcctcacttccaaaattttcaccatcctttgaggcttccaaatgccacctccactgagaaactttcccggattcagctttgcaccacgcaccccca

SEQ ID NO: 68285 - DNA, 110 bp, synthetic construct
  source 1..110: mol_type = other DNA
atgccacctccactgagaaactttcccggattcagctttgcaccacgcacccccaagtcgtttcctcctgctggtgtcctccagctgctttgtggtgtcacaggtcatgt

SEQ ID NO: 68286 - DNA, 110 bp, synthetic construct
  source 1..110: mol_type = other DNA
ttctattactctaatccctagcacttctgaaattgtcttgcaatatttcttagcttgttcagggtccatcactttaaaagctcggtgtgatcaacctcgtgtctcccact

SEQ ID NO: 68287 - DNA, 110 bp, synthetic construct
  source 1..110: mol_type = other DNA
tgttcagggtccatcactttaaaagctcggtgtgatcaacctcgtgtctcccactggctgtatgtgcctctagtgcctggtacagagtaggcacccagaaaacattgcta

SEQ ID NO: 68288 - DNA, 110 bp, synthetic construct
  source 1..110: mol_type = other DNA
attgtccctgaagttctgtgggtgcagccaataaggtatggactggggtgttggacacatttctgaccagattcagtttttctgcgtcgagctcatcaactcctgcaatc

SEQ ID NO: 68289 - DNA, 110 bp, synthetic construct
  source 1..110: mol_type = other DNA
cacatttctgaccagattcagtttttctgcgtcgagctcatcaactcctgcaatcatgatgaagcaacaatgaattgcagaagatgctggaagatgtacaatgacagatt

SEQ ID NO: 68290 - DNA, 110 bp, synthetic construct
  source 1..110: mol_type = other DNA
gacttatggttgccaggttggccggggttggggaggaagtcagatggacagggagtttagggttggtaggtgcaaactgttgtgtgtagagtggataagcaatgaggttg

SEQ ID NO: 68291 - DNA, 110 bp, synthetic construct
  source 1..110: mol_type = other DNA
ggttggggaggaagtcagatggacagggagtttagggttggtaggtgcaaactgttgtgtgtagagtggataagcaatgaggttgtactgtacagcacagggaactatac

SEQ ID NO: 68292 - DNA, 110 bp, synthetic construct
  source 1..110: mol_type = other DNA
ttaaaattacaactaccatatgatccagcaatttcaccatggggtatatagctgaaaaacaaaggaacaacagcacaacaacaaaaaccctccaaaatcagtatcccaga

SEQ ID NO: 68293 - DNA, 110 bp, synthetic construct
  source 1..110: mol_type = other DNA
agcatatggtgcaaagatagagggtgagtctaggaatgagatcctgtgtctgagaagatgctttcagcaccaaggaatagaactcccaacacaaatgattaaggaacaag

SEQ ID NO: 68294 - DNA, 110 bp, synthetic construct
  source 1..110: mol_type = other DNA
agatgctttcagcaccaaggaatagaactcccaacacaaatgattaaggaacaagaaagcttatttcatgtggttgttagtgatgcactcagtgtttcttgtgccttcct

SEQ ID NO: 68295 - DNA, 110 bp, synthetic construct
  source 1..110: mol_type = other DNA
taccttgacctcataaaacatcacagtcttgttaattgaggcaatgagtagaattctgacttcatttatttcaatagtgttccattttttcccccagaatatagatcaac

SEQ ID NO: 68296 - DNA, 110 bp, synthetic construct
  source 1..110: mol_type = other DNA
ctgacttcatttatttcaatagtgttccattttttcccccagaatatagatcaacatcctaagaaaagcttgaaagatgacgcttaatctagctcctgccaatttctgta

SEQ ID NO: 68297 - DNA, 110 bp, synthetic construct
  source 1..110: mol_type = other DNA
ataaacccagactgttcctcatcacatcctatggagatcctttaaggggaagatatctttgaaattcctgggagttcctatatttgatcagcttcatggggcatgggaca

SEQ ID NO: 68298 - DNA, 110 bp, synthetic construct
  source 1..110: mol_type = other DNA
aagagcaatgagcaagtatgagagtttccagaacacacaatctccaaactaataacagcttaattcaatttgtcagggatgaccactcctctatctcagattatagaaga

SEQ ID NO: 68299 - DNA, 110 bp, synthetic construct
  source 1..110: mol_type = other DNA
cagcttaattcaatttgtcagggatgaccactcctctatctcagattatagaagattgcagaaagatttccaggcacagaaaggtttccctttaaacaataaactctaca

SEQ ID NO: 68300 - DNA, 110 bp, synthetic construct; identical to SEQ ID NO: 68298
  source 1..110: mol_type = other DNA

SEQ ID NO: 68301 - DNA, 110 bp, synthetic construct; identical to SEQ ID NO: 68299
  source 1..110: mol_type = other DNA

SEQ ID NO: 68302 - DNA, 110 bp, synthetic construct
  source 1..110: mol_type = other DNA
tagtaacttacatccaaataagtaattaccacaaccatataagataataaaacatgtctcctccaccacattttttttcaaaagttctccctactcttcctactagattc

SEQ ID NO: 68303 - DNA, 110 bp, synthetic construct
  source 1..110: mol_type = other DNA
ttggtcatatattccaaagctgaataaagcaatgaccattgggattgatgatcaagtaaacagacactagttcattgtgccatgtattagttgactccgcggaagtattt

SEQ ID NO: 68304 - DNA, 110 bp, synthetic construct
  source 1..110: mol_type = other DNA
tagttggatttgtttccgctgcaccatgacgggaactccgagagttgcctcttttttttgagcttagttttcttttttttggggggggggaatacccacagcctgcaaaa

SEQ ID NO: 68305 - DNA, 110 bp, synthetic construct
  source 1..110: mol_type = other DNA
ttttgagcttagttttcttttttttggggggggggaatacccacagcctgcaaaagttcgtgggccaggaatcaaacccacaccacagctgtgactacaccagatcctta

SEQ ID NO: 68306 - DNA, 110 bp, synthetic construct
  source 1..110: mol_type = other DNA
aaaatctgttgtaagatgggaaagaggagcaaatggaaagtactggcattgctagaaatctgtttctttctctttttttttttctttttcaggccacacccacagcatat

SEQ ID NO: 68307 - DNA, 110 bp, synthetic construct
  source 1..110: mol_type = other DNA
atgggaaagaggagcaaatggaaagtactggcattgctagaaatctgtttctttctctttttttttttctttttcaggccacacccacagcatatggaggttcccaggct

SEQ ID NO: 68308 - DNA, 110 bp, synthetic construct
  source 1..110: mol_type = other DNA
gggtcatccttcagtcctttggttttcatgttcagcagcttgatcaggtaggacctaaacctggttctgccctttcttacccgttgttctaaccagaaacagcagatcag

SEQ ID NO: 68309 - DNA, 110 bp, synthetic construct
  source 1..110: mol_type = other DNA
taaacctggttctgccctttcttacccgttgttctaaccagaaacagcagatcagggtggccccattatccggttattcttttccttgtcttctccactccttcctgggg

SEQ ID NO: 68310 - DNA, 110 bp, synthetic construct
  source 1..110: mol_type = other DNA
ccaaatgtcatgtacttggctggggtgaccagggtctctcaatattcagcagtctagctaggcttttcatgtggtggctgggcaaggttctaagagtgagtggatgtgag

SEQ ID NO: 68311 - DNA, 110 bp, synthetic construct
  source 1..110: mol_type = other DNA
agctaggcttttcatgtggtggctgggcaaggttctaagagtgagtggatgtgagaaaggcctgggctaagaagttgcacagtgtcatttctgatgcattctcttggcca

SEQ ID NO: 68312 - DNA, 110 bp, synthetic construct
  source 1..110: mol_type = other DNA
acaaatctcgtattctcaccttccagaaatgcccttttacttttcctcctggtgtcagagttgaggatgccatcccttcctccttcctcctggcctctccttcccgtctg

SEQ ID NO: 68313 - DNA, 110 bp, synthetic construct
  source 1..110: mol_type = other DNA
caaagccatgcctgcagattttctatacttcctctttgcttgaagccagtagctctttgccagcagagtagccctttgtccatatgggtgtctgcagtggccccaggttg

SEQ ID NO: 68314 - DNA, 110 bp, synthetic construct
  source 1..110: mol_type = other DNA
tttgccagcagagtagccctttgtccatatgggtgtctgcagtggccccaggttggcaggtcatggtagggctgggaacttgagctacagtcccacgagcttcaaaagca

SEQ ID NO: 68315 - DNA, 110 bp, synthetic construct
  source 1..110: mol_type = other DNA
tgaaactcatttcaaacaactaaccaatgaattgaaaatgttgaaaccacatatagagaaaagcaagtgtcatcctaggaaacaaagcttgtctctattgttcttggaaa

SEQ ID NO: 68316 - DNA, 110 bp, synthetic construct
  source 1..110: mol_type = other DNA
ttgatttggccacagtgactgggagttaggaagagcctcctgttttcctttgaacttggttgtaaaccatgtgtccaggtgggaagacagcagctctagagtccagccca

SEQ ID NO: 68317 - DNA, 110 bp, synthetic construct
  source 1..110: mol_type = other DNA
ttggttgtaaaccatgtgtccaggtgggaagacagcagctctagagtccagcccaggccggccttgctgggaacccctccttgcccttgcacacaacccaaccctcggaa

SEQ ID NO: 68318 - DNA, 110 bp, synthetic construct
  source 1..110: mol_type = other DNA
agagtgatgctcagcttttcagcctctgtactaactcttccagaaatggcaggcattcttagaggaagagcatccccaaatgtcaagcttacctctctatttctctctgc

SEQ ID NO: 68319 - DNA, 110 bp, synthetic construct
  source 1..110: mol_type = other DNA
agatagccagattcatctgcaagaacgtgggcttcagcgtgggcaagttctgcatcatgcctaaaaagagctggccgccgtcaagtttcagggtgtgtgctcacagtttg

SEQ ID NO: 68320 - DNA, 110 bp, synthetic construct
  source 1..110: mol_type = other DNA
catgcctaaaaagagctggccgccgtcaagtttcagggtgtgtgctcacagtttgccacctggaaagagaacagatcccccgaaggaaatcacccctctgagggaccggc

SEQ ID NO: 68321 - DNA, 110 bp, synthetic construct
  source 1..110: mol_type = other DNA
tacaatgatttttcattatttactaataacatatttgcctttctctgaaaagcttacatctagtgcttacccttagatgaagtagttttcactgacttctgtgtcatgta

SEQ ID NO: 68322 - DNA, 110 bp, synthetic construct; identical to SEQ ID NO: 68321
  source 1..110: mol_type = other DNA

SEQ ID NO: 68323 - DNA, 110 bp, synthetic construct
  source 1..110: mol_type = other DNA
gcgtagactggcagctgtagctccaattttactctagcctgggattttaggtgtgggactgaaaaagaagataataaataagaaaataagaacgactgtaagtaccttaa

SEQ ID NO: 68324 - DNA, 110 bp, synthetic construct
  source 1..110: mol_type = other DNA
ggtgtccacacccctgatggtgagggcctggaaaacagtggaagaaaaggtttcggtcattgagaaggacggcctccggccacgggaggccaggaaactctcagcacccc

SEQ ID NO: 68325 - DNA, 110 bp, synthetic construct
  source 1..110: mol_type = other DNA
aggagatgggacacagactgaagaactcagaggaatcacacagctgggtggggtggggagggaagtttgtggatgatcagcagccactgctcctctgaaggtaggcagag

SEQ ID NO: 68326 - DNA, 110 bp, synthetic construct
  source 1..110: mol_type = other DNA
ctaaaatgtgttggaatggaagcaaaagagccataaacacaagcatgaacatatactaacatctgtgatcatgtgccagctcccttacttctgagaccagatcaggcaga

SEQ ID NO: 68327 - DNA, 110 bp, synthetic construct
  source 1..110: mol_type = other DNA
tagcatttatttcttgacctccacttagaaaaccttaacaattagcttctgtattaatagcaggtcctatgcccatggagcctatcacagaatctggggcgtgaacatac

SEQ ID NO: 68328 - DNA, 110 bp, synthetic construct
  source 1..110: mol_type = other DNA
aatagcaggtcctatgcccatggagcctatcacagaatctggggcgtgaacatacacttttaggaaacgaaggaatgaagaaaaagaaaaacaagttttcttaagaaaag

SEQ ID NO: 68329 - DNA, 110 bp, synthetic construct
  source 1..110: mol_type = other DNA
tagtcatcactgtgagcacagctcctactttgggtcatcttacagttactccttagacaattgaaatgtattaagctgttcaaccacattctaaatagcactgaagacgt

SEQ ID NO: 68330 - DNA, 110 bp, synthetic construct
  source 1..110: mol_type = other DNA
cgaaagctgtgtccaggggagagatgagggatgtgagaggcagacacggatgtggtcttggctcctgtagcatcggtcactcaataaatgccccctcatgcttactctgg

SEQ ID NO: 68331 - DNA, 110 bp, synthetic construct
  source 1..110: mol_type = other DNA
tcttggctcctgtagcatcggtcactcaataaatgccccctcatgcttactctgggctgggcactgtggatgccatagggaacaggagagccaacaacacgccttcaggg

SEQ ID NO: 68332 - DNA, 110 bp, synthetic construct; identical to SEQ ID NO: 68330
  source 1..110: mol_type = other DNA

SEQ ID NO: 68333 - DNA, 110 bp, synthetic construct; identical to SEQ ID NO: 68331
  source 1..110: mol_type = other DNA

SEQ ID NO: 68334 - DNA, 110 bp, synthetic construct
  source 1..110: mol_type = other DNA
tacggtttacttagtaaatggctgagagcaggcagcatacttgtgtgtttccacgtgtcatctctaaaatccaaaaaaccccaccaagctttacacctgtttttactgaa

SEQ ID NO: 68335 - DNA, 110 bp, synthetic construct
  source 1..110: mol_type = other DNA
attctgtagatgtacagattttctaactgattttctctttgtccgaattattagaaaattaaaagctagatctaggatctatcttagtttgggggctttcatttttcaac

SEQ ID NO: 68336 - DNA, 110 bp, synthetic construct
  source 1..110: mol_type = other DNA
attggaatgctcctcaagacccacatgaaaggtcatcatatatggctattaaagccagcactggcttatttcaccttcgtttatcttggcttacctaaccttggtttatc

SEQ ID NO: 68337 - DNA, 110 bp, synthetic construct
  source 1..110: mol_type = other DNA
tccagcgctccaataccatccacactgcccaccagacgggactttggaagagtcttctactgcagggaacccaagctgcccaggaataaggacaaaatgtgctgacgtct

SEQ ID NO: 68338 - DNA, 110 bp, synthetic construct
  source 1..110: mol_type = other DNA
agctgattaggggcaaacttaagccatcaccccgtattggcgagtgagcttgggcaagtgatataacctcagattcctcatctgtaaaatggggctagtaaatggagttc

SEQ ID NO: 68339 - DNA, 110 bp, synthetic construct
  source 1..110: mol_type = other DNA
ggtgataatgagattaaattcctctccccagaaaatcattcacatccttccagtagagcccaaacagctctttgcaatgttacccattaagcatggtaactgagaaaagc

SEQ ID NO: 68340 - DNA, 110 bp, synthetic construct
  source 1..110: mol_type = other DNA
ctttttttaaaaatggtattaaaagtttcaagatgacaatagaagagcattgagccaagtatagggcccttctaactgcagagctctatgaccacatggattgcatgccc

SEQ ID NO: 68341 - DNA, 110 bp, synthetic construct
  source 1..110: mol_type = other DNA
ctgtggcacatgttcaagccctagcctgggaacgtccacatgccatgagcgcagccgaaataccccaaacatggacagcaactggaatcctctcacttggccagtccccc

SEQ ID NO: 68342 - DNA, 110 bp, synthetic construct
  source 1..110: mol_type = other DNA
cgaaataccccaaacatggacagcaactggaatcctctcacttggccagtccccctgcgaattagcataagactttagaaaactatttggcaaaatctattaaaggataa

SEQ ID NO: 68343 - DNA, 110 bp, synthetic construct
  source 1..110: mol_type = other DNA
cccagtaaatatcatggccaaagcacccctgtcttctgcctccagactatactggggttttccacatggccccgtgtgccatacctatctccaggacctgtgagtacaat

SEQ ID NO: 68344 - DNA, 110 bp, synthetic construct
  source 1..110: mol_type = other DNA
ggttttccacatggccccgtgtgccatacctatctccaggacctgtgagtacaataaacttcatttccctgagcctctcctcttctggccatctcataaatatatacaaa

SEQ ID NO: 68345 - DNA, 110 bp, synthetic construct
  source 1..110: mol_type = other DNA
tgctgtaaagtattattaatgaatcagtcaacaagtatttattgagtgcctggcgtgaacccataatcttttgtgagcttgactgttttgagttccagcggatattttgt

SEQ ID NO: 68346 - DNA, 110 bp, synthetic construct
  source 1..110: mol_type = other DNA
tgaacccataatcttttgtgagcttgactgttttgagttccagcggatattttgtggctaagtaagtgacaatatctgattattcattttctttcattatctaactaggg

SEQ ID NO: 68347 - DNA, 110 bp, synthetic construct
  source 1..110: mol_type = other DNA
atggataggggaagggaggcactcttcagattgagtgacatgcgtgagtagtgtatgcggatctatctcatcacgtggacagacaggctgcaaagctcagtcatcctgca

SEQ ID NO: 68348 - DNA, 110 bp, synthetic construct
  source 1..110: mol_type = other DNA
tgcggatctatctcatcacgtggacagacaggctgcaaagctcagtcatcctgcaggtccccatcagtgtgtctggccttgaccgtgttcctttcctcttctcacctttg

SEQ ID NO: 68349 - DNA, 110 bp, synthetic construct
  source 1..110: mol_type = other DNA
tggcatccggactagggcccttggggcccagcataaccaaggacaggttgtccagcatggctttgttgagctcctccaagccgtcacccatgaggtgcttggtgctggct

SEQ ID NO: 68350 - DNA, 110 bp, synthetic construct
  source 1..110: mol_type = other DNA
catggctttgttgagctcctccaagccgtcacccatgaggtgcttggtgctggctgagtgtatcatccggtggtctccctgcatggagcggtagccaaataccttcagca

SEQ ID NO: 68351 - DNA, 110 bp, synthetic construct
  source 1..110: mol_type = other DNA
tctcatcatggaggcccttaccccttcatctccatcagccgcaaatgccactcacatctttctctttctttcccatttcccttgctttgcatggttcagctggtctctgg

SEQ ID NO: 68352 - DNA, 110 bp, synthetic construct
  source 1..110: mol_type = other DNA
atctttctctttctttcccatttcccttgctttgcatggttcagctggtctctggccctggcccctctgtgccccagcctctctcctctcctcttgacaagtgctcccca

SEQ ID NO: 68353 - DNA, 110 bp, synthetic construct
  source 1..110: mol_type = other DNA
acaaaaaaaacgaagagctctgttttggttcatgtggctatgggaagaagtacgtgcaagttatttggcatttaaagtattacatagtactgtgatatgtgtagagataa

SEQ ID NO: 68354 - DNA, 110 bp, synthetic construct
  source 1..110: mol_type = other DNA
ggcttcaggagctcaaactttgtgagcgtgcatatactgaaggcaggtgcagctgatacatgagctctggcaatagagacgaatctgactttttgggcgcacacaccagg

SEQ ID NO: 68355 - DNA, 110 bp, synthetic construct
  source 1..110: mol_type = other DNA
atacatgagctctggcaatagagacgaatctgactttttgggcgcacacaccaggtaacaggtagcatcacagagtcacatgtcccagtggacagatcctgggtagaatc

SEQ ID NO: 68356 - DNA, 110 bp, synthetic construct
  source 1..110: mol_type = other DNA
acacctctggggatgccctctgcttgggggactccagccccgttctgtgctccacatgcaacaccactctcatggatcatgggccagtgcaatccaggctggttctactc

SEQ ID NO: 68357 - DNA, 110 bp, synthetic construct
  source 1..110: mol_type = other DNA
aggctgggattggtctctgctctgttctccctcagggccccgtgtgtacatccatcagagctgccagcgctctgtcaggcattgtttgcttgtttttatcctttgctgag

SEQ ID NO: 68358 - DNA, 110 bp, synthetic construct
  source 1..110: mol_type = other DNA
acctccttccacccaccaaagctgccaggggtaacacagagaccagtggtgggatggatgaggaagggctcctcagagccagatttgtctaactagcaggcacaagagtg

SEQ ID NO: 68359 - DNA, 110 bp, synthetic construct
  source 1..110: mol_type = other DNA
accccctggtttctcagagtctccctggcctcctaactcctgttgtattaggaaggtagcagcagctggaagtgagtgtgctcacgcttctgccaagaatctctcctccc

SEQ ID NO: 68360 - DNA, 110 bp, synthetic construct
  source 1..110: mol_type = other DNA
atcaaccattgtgctgtaaatcagtggttctgggcatctttccctcctcctagctgcaggtgtgccacctttctctggtttcccaggttctgtggattctctgcaccaca

SEQ ID NO: 68361 - DNA, 110 bp, synthetic construct
  source 1..110: mol_type = other DNA
gcaggtgtgccacctttctctggtttcccaggttctgtggattctctgcaccacataccaagtcctgagtcacagggccaaacagagaggctatggatggttcagggact

SEQ ID NO: 68362 - DNA, 110 bp, synthetic construct
  source 1..110: mol_type = other DNA
gacctcgcctctacacaagcccagcttccaaagaaaaatgcgtggagccagctacagaaaataactccaccctccaccctacttctctgagcttcttaaaacaaaaacct

SEQ ID NO: 68363 - DNA, 110 bp, synthetic construct
  source 1..110: mol_type = other DNA
tatcccatttaatcctcagagaagagctgggaggaggttaacgaggagggccctgcttacagacctgttgctgtcggtgaacccgagatcaccagctggtgagtgtccgg

SEQ ID NO: 68364 - DNA, 110 bp, synthetic construct
  source 1..110: mol_type = other DNA
aaaacaaaagaaatgtcattcaagtttctagctgtaaaatgagggagctgggactcatcactctcccatcaggaagctggattcattcatgttctccctcctcagttcgt

SEQ ID NO: 68365 - DNA, 110 bp, synthetic construct
  source 1..110: mol_type = other DNA
cctcagcactatctgaggagcttaaatcttcagaaattccaccaaataaaatataatgctcaactttcagattttgcatttttttcaactgacataagcatggctgagag

SEQ ID NO: 68366 - DNA, 110 bp, synthetic construct
  source 1..110: mol_type = other DNA
aaatgtatttgcatggctcagttcaacctcttgtttcttcagcatgggttccagagagagaaaacatggggagtagattccaatgtactcacagctgggagcagagccca

SEQ ID NO: 68367 - DNA, 110 bp, synthetic construct
  source 1..110: mol_type = other DNA
gagagaaaacatggggagtagattccaatgtactcacagctgggagcagagcccaggagaatctgagctaacccatagtcctcatgtaataattaaaggcttgtagatat

SEQ ID NO: 68368 - DNA, 110 bp, synthetic construct
  source 1..110: mol_type = other DNA
aagacggaagaagacagaatgtgtgcaaaccatttccaccagaaaattctttgtagacatagagctgttcttccccagctgagaacagaacagcgcctcctaatgtctgt

SEQ ID NO: 68369 - DNA, 110 bp, synthetic construct
  source 1..110: mol_type = other DNA
gacatagagctgttcttccccagctgagaacagaacagcgcctcctaatgtctgtgccatgctttcaacagtcaccaccatcaagactgtatatggcatagacctattat

SEQ ID NO: 68370 - DNA, 110 bp, synthetic construct
  source 1..110: mol_type = other DNA
ggagtctaaccttgtgtttctctgagaagcaactgtttggtgttggctaattccgtgttcagagctgcttcacagaacatatcaacaacaaaaaaccctggcgtttttga

SEQ ID NO: 68371 - DNA, 110 bp, synthetic construct
  source 1..110: mol_type = other DNA
atgacttctctgcacgcactctaactccacctctattgcccgaatcctcagcaccatccaccagagctggggccactgtgtttctagaatctagcacagaaggaggaaca

SEQ ID NO: 68372 - DNA, 110 bp, synthetic construct
  source 1..110: mol_type = other DNA
atccaccagagctggggccactgtgtttctagaatctagcacagaaggaggaacaccctgggatgactccgggcatggacaggaggctcaaatggaaaccctgaaggaaa

SEQ ID NO: 68373 - DNA, 110 bp, synthetic construct
  source 1..110: mol_type = other DNA
ctgattccccactatccatatgagttctggacatcctgggttcgctggcaacgtagggcttgagtgtccaaggctgcaggcctgaaagaggttgacctccatggcccgct

SEQ ID NO: 68374 - DNA, 110 bp, synthetic construct
  source 1..110: mol_type = other DNA
cttcaccaagaaccacctgtaggcagcagggcacccaactacaaatccacacattttctcatccagactcacagcctgctggtcagtaagttctcccagctacaaaatgg

SEQ ID NO: 68375 - DNA, 110 bp, synthetic construct
  source 1..110: mol_type = other DNA
ttctcatccagactcacagcctgctggtcagtaagttctcccagctacaaaatggagctggaacccactgcccagcccacctctctgggcctagaagaactcagggtgtg

SEQ ID NO: 68376 - DNA, 110 bp, synthetic construct
  source 1..110: mol_type = other DNA
ccacttggagaggtcctggcagcatgtctgccctgaagcacctgggtcctttgggtagccatctgtctctacccatctccttgacagcttgccccccacccccaccccgg

SEQ ID NO: 68377 - DNA, 110 bp, synthetic construct
  source 1..110: mol_type = other DNA
ccagagcctggtggctatctgaagccccagtactggctccaggatatctgacaacacaatgtccagctaattagctgctgccagtggtacaggacctggacccaaaatct

SEQ ID NO: 68378 - DNA, 110 bp, synthetic construct
  source 1..110: mol_type = other DNA
ttaccaggccagggatcagatccaagctgcagttgatacctaagctgcagctttgccaatgcaggattcccaacccactatgaggggctgaggaattgaacctgcgtccc

SEQ ID NO: 68379 - DNA, 110 bp, synthetic construct
  source 1..110: mol_type = other DNA
ttgaaatctcttgctgtgtatgtgaccctggactcttgggggttcccgagctccctaatggtgtcttcgccaggctgccccgacatctctggtgatactcctatggcgca

SEQ ID NO: 68380 - DNA, 110 bp, synthetic construct
  source 1..110: mol_type = other DNA
taatggtgtcttcgccaggctgccccgacatctctggtgatactcctatggcgcacaggccaggtaggaacttggtctcatgtaatggaaaccttatatgcctcctgagc

SEQ ID NO: 68381 - DNA, 110 bp, synthetic construct; identical to SEQ ID NO: 68379
  source 1..110: mol_type = other DNA

SEQ ID NO: 68382 - DNA, 110 bp, synthetic construct; identical to SEQ ID NO: 68380
  source 1..110: mol_type = other DNA

SEQ ID NO: 68383 - DNA, 110 bp, synthetic construct
  source 1..110: mol_type = other DNA
gccaggaaacacatattgagcatccagtatgttccgggcactgtgctaggctgtggggtacagctgtggggaaagcacagaggccctgcccacagcactggcaagctaat

SEQ ID NO: 68384 - DNA, 110 bp, synthetic construct
  source 1..110: mol_type = other DNA
cagagccaattgctgctactaatcccagtcctcccgaagccagtggtgaaaacgttcaccagtggtgatcctgccgtgccctagagaacctgagggggaaatgggaccca

SEQ ID NO: 68385 - DNA, 110 bp, synthetic construct
  source 1..110: mol_type = other DNA
cttcgctccctggaggtccagggccacgggataacctcagggtctctttggagatcaagtccacagctccaaagagaaaggatggagtgggctgaatataccttctactg

SEQ ID NO: 68386 - DNA, 110 bp, synthetic construct
  source 1..110: mol_type = other DNA
atggtagtatccaggctttcctcagggcagttagggctgagcttgccctgccttgaaggggatggaaaacagaggaaatccaaaagcatggtgttgtgaaaaggacaaaa

SEQ ID NO: 68387 - DNA, 110 bp, synthetic construct
  source 1..110: mol_type = other DNA
atggaagtaggggaacctagaaaggcagggagagaaaagatgctacagggcctagagtactaagtggaagcttatgggctttatctgcagaggtgaaacactgcctttaa

SEQ ID NO: 68388 - DNA, 110 bp, synthetic construct
  source 1..110: mol_type = other DNA
gagctttaagtcccatcaaggcctcactcttcagcgaaacagacataaaatagttcacttctcctttgttctgactagattacgtgccagtgagagctaagtgacaggag

SEQ ID NO: 68389 - DNA, 110 bp, synthetic construct
  source 1..110: mol_type = other DNA
cacttctcctttgttctgactagattacgtgccagtgagagctaagtgacaggaggctggcttgggagtctcagagtgagggtttccatgtgtgacatacttggagagga

SEQ ID NO: 68390 - DNA, 110 bp, synthetic construct
  source 1..110: mol_type = other DNA
atcaagaagagcttgaacactctctgtgctccagggagctcggatttacctgctaaaagtaaaaggtaatctcaagtccatggatgcgtctttaaaaacagagccaaacg

SEQ ID NO: 68391 - DNA, 110 bp, synthetic construct
  source 1..110: mol_type = other DNA
tcccagggttgggcagatctaaggatgagtccaggccctgccacctctgagccgggtgatctagcaggattcacaccacttcttcatgcctctgcgtcttcagttgtaaa

SEQ ID NO: 68392 - DNA, 110 bp, synthetic construct
  source 1..110: mol_type = other DNA
gtcgttttaggttggaaggcccatcataccctccatgttcatcccctttctttagagccttgacctgaactatttcaccctgttttcctgccgctgtagcacctgtataa

SEQ ID NO: 68393 - DNA, 110 bp, synthetic construct
  source 1..110: mol_type = other DNA
ggcgtggggagtactgtcttgcttagcgtctcaagaagctggtaaggaagggagcaagaggcaaaccttcttccactgaagtattaggaggacgatgaagacgacagatt

SEQ ID NO: 68394 - DNA, 110 bp, synthetic construct
  source 1..110: mol_type = other DNA
tcccaacagcaccaaccccatagtcattgcaagggtctggctcctggtcagttctcagtctattccaattatggggtgcggccagctgaattcctcccagcctcagtttt

SEQ ID NO: 68395 - DNA, 110 bp, synthetic construct
  source 1..110: mol_type = other DNA
cagtctattccaattatggggtgcggccagctgaattcctcccagcctcagttttttcagtgtccccagaagaggctggagggcctggtctaattctcctttgccactga

SEQ ID NO: 68396 - DNA, 110 bp, synthetic construct
  source 1..110: mol_type = other DNA
cttgggggtgaaggaatgtgcagttgaatgagtcctgtttgacttggctgaagaaggggactgttgccatctgtacattgtgcattgtgacttccaggtgcagggacagc

SEQ ID NO: 68397 - DNA, 110 bp, synthetic construct
  source 1..110: mol_type = other DNA
ggggactgttgccatctgtacattgtgcattgtgacttccaggtgcagggacagctttgtgctaaagcatcctcataaccttgcctggccctttgtggcattgagagctg

SEQ ID NO: 68398 - DNA, 110 bp, synthetic construct
  source 1..110: mol_type = other DNA
gagtagaatggacaggacttggtgacctggatgtttcctaatttgtgtgatgctggacgcggtgacgtgccctctgctgctcgagctcccttccccatgggtgtgcagcc

SEQ ID NO: 68399 - DNA, 110 bp, synthetic construct
  source 1..110: mol_type = other DNA
gacgcggtgacgtgccctctgctgctcgagctcccttccccatgggtgtgcagccctgagaagattcagatggattcagacctcccaccgcactccattcctgaaatttt

SEQ ID NO: 68400 - DNA, 110 bp, synthetic construct
  source 1..110: mol_type = other DNA
aatcacgcagctcttgttcagtaggatatttggaggaacataaggcatcgctggatcattgctgtttgatttccttataaatcgcagaggtcccttctgttgtgctctgt

SEQ ID NO: 68401 - DNA, 110 bp, synthetic construct
  source 1..110: mol_type = other DNA
tcattgctgtttgatttccttataaatcgcagaggtcccttctgttgtgctctgtcatgatgaccctccaatgtccagatctagagggaaggtcccaccgtgaaatccga

SEQ ID NO: 68402 - DNA, 110 bp, synthetic construct
  source 1..110: mol_type = other DNA
ccaaattgaagtcgaagatcatttatttattgctgttaacccctttccccctggacaagagcatttggatgtttattcttccaaagccccatttcagaggtctgagtaca

SEQ ID NO: 68403 - DNA, 110 bp, synthetic construct
  source 1..110: mol_type = other DNA
caagagcatttggatgtttattcttccaaagccccatttcagaggtctgagtacagtatgcagacttaccgcaaaagtactcaagagtcggtggggaaacatctccgccc

SEQ ID NO: 68404 - DNA, 110 bp, synthetic construct; identical to SEQ ID NO: 68402
  source 1..110: mol_type = other DNA

SEQ ID NO: 68405 - DNA, 110 bp, synthetic construct; identical to SEQ ID NO: 68403
  source 1..110: mol_type = other DNA

SEQ ID NO: 68406 - DNA, 110 bp, synthetic construct
  source 1..110: mol_type = other DNA
attggagaatacatgaagttactgtcatgcatattagtaacataggtagcagttcctagaagcttaccatgtgctggacattgtgctaagcattttacgtaaatgttgtg

SEQ ID NO: 68407 - DNA, 110 bp, synthetic construct
  source 1..110: mol_type = other DNA
ctagaagcttaccatgtgctggacattgtgctaagcattttacgtaaatgttgtgctcccaagaacctcgaagagcagggaggttgagatgtgcttagtgtcacccagcc

SEQ ID NO: 68408 - DNA, 110 bp, synthetic construct; identical to SEQ ID NO: 68406
  source 1..110: mol_type = other DNA

SEQ ID NO: 68409 - DNA, 110 bp, synthetic construct; identical to SEQ ID NO: 68407
  source 1..110: mol_type = other DNA

SEQ ID NO: 68410 - DNA, 110 bp, synthetic construct
  source 1..110: mol_type = other DNA
aagacttcagtgtcttctagagcaggggttgtcaaactatttctataaagggccagataataaatattctagattttattggccatgtggtctctgttgcaactactcaa

SEQ ID NO: 68411 - DNA, 110 bp, synthetic construct
  source 1..110: mol_type = other DNA
gataataaatattctagattttattggccatgtggtctctgttgcaactactcaattctgctctacggaagcaactaaagacagtacataaatgaatgggtatagttatg

SEQ ID NO: 68412 - DNA, 110 bp, synthetic construct; identical to SEQ ID NO: 68410
  source 1..110: mol_type = other DNA

SEQ ID NO: 68413 - DNA, 110 bp, synthetic construct; identical to SEQ ID NO: 68411
  source 1..110: mol_type = other DNA

SEQ ID NO: 68414 - DNA, 110 bp, synthetic construct
  source 1..110: mol_type = other DNA
aggtagtctaggctggtacaatgtttaacagtgtcatcaagacagagattctttcacgttccatccacgccatttttaatacatggtcttatctttgttgttgtagttgg

SEQ ID NO: 68415 - DNA, 110 bp, synthetic construct
  source 1..110: mol_type = other DNA
acttttggggacatggtctagtgtaactcttttttttggtcacaccctgggcacaccacggttcctaggctaggtatcaaatctgagctgcaggtgcgacccatgccact

SEQ ID NO: 68416 - DNA, 110 bp, synthetic construct
  source 1..110: mol_type = other DNA
actcttttttttggtcacaccctgggcacaccacggttcctaggctaggtatcaaatctgagctgcaggtgcgacccatgccactgccacgcaatgccagatccttaacc

SEQ ID NO: 68417 - DNA, 110 bp, synthetic construct
  source 1..110: mol_type = other DNA
tcaaggcattatctgctattttaataagctcaatttttgtcacaagtactggttggtatcctaataatcacacaagaagtagctgtgatattgtgctaagagccagagcc

SEQ ID NO: 68418 - DNA, 110 bp, synthetic construct
  source 1..110: mol_type = other DNA
gggacaagaatgagaaggtttccagaagggcatgtcatcctgcccccaaatcatcattagcactgctgtgtccaggctgcgaattgcccagctctgagaaatagctaaca

SEQ ID NO: 68419 - DNA, 110 bp, synthetic construct
  source 1..110: mol_type = other DNA
attagcactgctgtgtccaggctgcgaattgcccagctctgagaaatagctaacattccaggggtgaaggtcacacacttttgcatcatgccctcatttcagcataacat

SEQ ID NO: 68420 - DNA, 110 bp, synthetic construct; identical to SEQ ID NO: 68418
  source 1..110: mol_type = other DNA

SEQ ID NO: 68421 - DNA, 110 bp, synthetic construct; identical to SEQ ID NO: 68419
  source 1..110: mol_type = other DNA

SEQ ID NO: 68422 - DNA, 110 bp, synthetic construct
  source 1..110: mol_type = other DNA
acaatagaagtttattctctcacagttcacaggaccaaaagtcagaaatccaggtgtaggcagggttgattccttcgggcggttctgagggaggatctgctccatgcctc

SEQ ID NO: 68423 - DNA, 110 bp, synthetic construct
  source 1..110: mol_type = other DNA
gtaggcagggttgattccttcgggcggttctgagggaggatctgctccatgcctctcccagctgctggtaggtgctgccagatcttggtattccttggtttgtagacaca

SEQ ID NO: 68424 - DNA, 110 bp, synthetic construct; identical to SEQ ID NO: 68422
  source 1..110: mol_type = other DNA

SEQ ID NO: 68425 - DNA, 110 bp, synthetic construct; identical to SEQ ID NO: 68423
  source 1..110: mol_type = other DNA

SEQ ID NO: 68426 - DNA, 110 bp, synthetic construct
  source 1..110: mol_type = other DNA
accaagacctggcaggacccccactctttggtggctgatggaggttagagagacagcagctgccagtggatgccagctatcccgaggaggcctgctcccttccaagccta

SEQ ID NO: 68427 - DNA, 110 bp, synthetic construct
  source 1..110: mol_type = other DNA
gcagctgccagtggatgccagctatcccgaggaggcctgctcccttccaagcctaattcttcctccctaaatttccctctactcctcagcaatgctaccaagaaggaaac

SEQ ID NO: 68428 - DNA, 110 bp, synthetic construct; identical to SEQ ID NO: 68426
  source 1..110: mol_type = other DNA

SEQ ID NO: 68429 - DNA, 110 bp, synthetic construct; identical to SEQ ID NO: 68427
  source 1..110: mol_type = other DNA

SEQ ID NO: 68430 - DNA, 110 bp, synthetic construct
  source 1..110: mol_type = other DNA
tgaaaatacatttttttgccaaagggaaaattggtaattttatcccagagctgattgcttctggatggaaaaataagggacaaattaatttgaaatatagaaagttacag

SEQ ID NO: 68431 - DNA, 110 bp, synthetic construct
  source 1..110: mol_type = other DNA
ccccatccatcactatgaacaagccactgtggccttaccccatcctggagcatgccaagggcagtcctgtctctggggttttttatcagctgtttcctctacctggaaac

SEQ ID NO: 68432 - DNA, 110 bp, synthetic construct
  source 1..110: mol_type = other DNA
caagggcagtcctgtctctggggttttttatcagctgtttcctctacctggaaactttttcccagagccacctcctcctcagcattcaaactctgctcatatgtctcctt

SEQ ID NO: 68433 - DNA, 110 bp, synthetic construct
  source 1..110: mol_type = other DNA
ggatgttcccttatacccactttgttgagagtttttatcataaataaatttagaattttgtcaaatggctcttttcatagctctctatttttcttttcgttccctcttcc

SEQ ID NO: 68434 - DNA, 110 bp, synthetic construct
  source 1..110: mol_type = other DNA
ttttgtcaaatggctcttttcatagctctctatttttcttttcgttccctcttcctttgtgttttaattgttcctttagtgttatgtttagattcatctatcatttgcct

SEQ ID NO: 68435 - DNA, 110 bp, synthetic construct
  source 1..110: mol_type = other DNA
aagtggcttaaacaaataggaactgattttcttcacatacaagcatgtacagagagatgtggctcagctatggggctcatccatgtcaccaaagatccagtatcttcgta

SEQ ID NO: 68436 - DNA, 110 bp, synthetic construct
  source 1..110: mol_type = other DNA
gatgtggctcagctatggggctcatccatgtcaccaaagatccagtatcttcgtagttctctactacgttgttcttagtttttggtcattgcttttgggtgcgaaatagt

SEQ ID NO: 68437 - DNA, 110 bp, synthetic construct
  source 1..110: mol_type = other DNA
gctctggtcctgggctattgtccttgacacagttttcttggcatgataggccctcatttaccatttcatcctccgttttcaaccctgtgcactctttccctttgcacccc

SEQ ID NO: 68438 - DNA, 110 bp, synthetic construct
  source 1..110: mol_type = other DNA
atttaccatttcatcctccgttttcaaccctgtgcactctttccctttgcaccccaagtgagtaggagtgattctttaaacaacctgccttttctttcaccaccagccct

SEQ ID NO: 68439 - DNA, 110 bp, synthetic construct; identical to SEQ ID NO: 68437
  source 1..110: mol_type = other DNA

SEQ ID NO: 68440 - DNA, 110 bp, synthetic construct; identical to SEQ ID NO: 68438
  source 1..110: mol_type = other DNA

SEQ ID NO: 68441 - DNA, 110 bp, synthetic construct
  source 1..110: mol_type = other DNA
cattctgcacccctcggctgagggagaggtttgctgggattccgctcaagttccttctctgagacattgtgtgctgcacagctcattccctgcctatcaaatattcatct

SEQ ID NO: 68442 - DNA, 110 bp, synthetic construct
  source 1..110: mol_type = other DNA
ttaaatggttgcagtaatattcaaaatcctaatactattacaccattttaaaataggcatgcatgaaagagtagtaatagtagtaataccatgctcagatgtaattcagg

SEQ ID NO: 68443 - DNA, 110 bp, synthetic construct
  source 1..110: mol_type = other DNA
ttaggtgcttaccaacttcatgggtttggctcactcagttaacctgcccaagcctcatgctcctcaagtggaaacaaaatgaatatactatggcaccaacctcccagctt

SEQ ID NO: 68444 - DNA, 110 bp, synthetic construct
  source 1..110: mol_type = other DNA
catgctcctcaagtggaaacaaaatgaatatactatggcaccaacctcccagctttgacatcagcattctatgggaaaatatacacagaacacttagcataagagctagc

SEQ ID NO: 68445 - DNA, 110 bp, synthetic construct
  source 1..110: mol_type = other DNA
acaggatggattttgcagcacaatcttatccagggctctacccagggtggtttcgcttttcagtgcttgataaatgccttcccatttccctgtgccatagacaaataggt

SEQ ID NO: 68446 - DNA, 110 bp, synthetic construct
  source 1..110: mol_type = other DNA
agcaagggaggagaagaaggggcttctgagaaacttgttctaattatatacattttagaatgtctcagtctttgacctttaaccattgtactacagactagtttttgtca

SEQ ID NO: 68447 - DNA, 110 bp, synthetic construct
  source 1..110: mol_type = other DNA
tagaatgtctcagtctttgacctttaaccattgtactacagactagtttttgtcattttgaagagattttccaggctaatcaagtcccaaagaattgaccctcagattgg

SEQ ID NO: 68448 - DNA, 110 bp, synthetic construct
  source 1..110: mol_type = other DNA
gaaggggacatttcgaccatctcaccaagataccaaaatccagctggtgatcactagaccacttcctgtcaaggatacatctttgtcagacattaaaatccgacctggat

SEQ ID NO: 68449 - DNA, 110 bp, synthetic construct
  source 1..110: mol_type = other DNA
agcaagagagggtgaaggacatagaagtaagcatccattatttagactgctcaacatctaactccctcagggcactgcccctcccagctcattgtgtttctcctgggctc

SEQ ID NO: 68450 - DNA, 110 bp, synthetic construct
  source 1..110: mol_type = other DNA
atctaactccctcagggcactgcccctcccagctcattgtgtttctcctgggctctcaactgaagagcctcatctccctcaccagagggagaagtgtcactcaagctaac

SEQ ID NO: 68451 - DNA, 110 bp, synthetic construct
  source 1..110: mol_type = other DNA
ccatagcaatgtcctcatgggatagcactgttttccaccacctccttcacctaagccccttactgcccttctatacccctgcgtgctcctcctaaggcctcagctttccc

SEQ ID NO: 68452 - DNA, 110 bp, synthetic construct
  source 1..110: mol_type = other DNA
ccccttactgcccttctatacccctgcgtgctcctcctaaggcctcagctttcccctgggattctgagacccccttctttcattttttggttatggttagccaaattccc

SEQ ID NO: 68453 - DNA, 110 bp, synthetic construct
  source 1..110: mol_type = other DNA
cagacagacacacattattttcttctggacagtttgagagcaagttacagatatactgctcttcacccttaaatacttcaaggtgtgtttattcaaaacaggacattatt

SEQ ID NO: 68454 - DNA, 110 bp, synthetic construct
  source 1..110: mol_type = other DNA
tgcagttacttttcatcccacctagtttctctgtactctgttgctggaggagagctgtccacttggtgatctctccagtcaagtgtcctaggtcccggatcccagcctgt

SEQ ID NO: 68455 - DNA, 110 bp, synthetic construct
  source 1..110: mol_type = other DNA
tgtccacttggtgatctctccagtcaagtgtcctaggtcccggatcccagcctgtgtcactggtggttgtgattgtaatgatcatattacagtacagacaccatttagca

SEQ ID NO: 68456 - DNA, 110 bp, synthetic construct
  source 1..110: mol_type = other DNA
aggactcattcaaggataaagaaatgtcatctactcatacttttccctctctgattcagcacttctaccataccctacattgcacccactattctttataaaaactatga

SEQ ID NO: 68457 - DNA, 110 bp, synthetic construct
  source 1..110: mol_type = other DNA
catacttttccctctctgattcagcacttctaccataccctacattgcacccactattctttataaaaactatgaattttttatttttttaaaaaaaaagaagagtaggg

SEQ ID NO: 68458 - DNA, 110 bp, synthetic construct
  source 1..110: mol_type = other DNA
cgccttctaatttttgttgaaagtgaggtaccatttaaatggaaccctgtgtgtctctagcagcaattcctcttcctggccttccattccagtaggctctgattctctgt

SEQ ID NO: 68459 - DNA, 110 bp, synthetic construct
  source 1..110: mol_type = other DNA
agtagtagagcaggggacatcagcataaataacataaaagctagaatatataagaaactgagcaggaattaagcttgtaggggccaggcactaaggcagtcactttccac

SEQ ID NO: 68460 - DNA, 110 bp, synthetic construct
  source 1..110: mol_type = other DNA
aactgagcaggaattaagcttgtaggggccaggcactaaggcagtcactttccacaaataatcccagtttatctacctaaccactttatagactagaaatcacttttctc

SEQ ID NO: 68461 - DNA, 110 bp, synthetic construct
  source 1..110: mol_type = other DNA
gcagtggttcttagcctgaggtctttgggtcactagatgtagtttattagggacccctagagggctgaatccactgaatctatatgatgttttaaatatatgtggagatg

SEQ ID NO: 68462 - DNA, 110 bp, synthetic construct
  source 1..110: mol_type = other DNA
agacttgaggatagttctgggtgaaacttgctgggaaggaggggctggcaggttggagaagttggcagcaggtggtctaggaccttacatgtcatgggcccttcatatcc

SEQ ID NO: 68463 - DNA, 110 bp, synthetic construct
  source 1..110: mol_type = other DNA
gagaagttggcagcaggtggtctaggaccttacatgtcatgggcccttcatatcctcaggaatatagtttaatcaggtgtaactatctgagcccagagattttcatggtc

SEQ ID NO: 68464 - DNA, 110 bp, synthetic construct
  source 1..110: mol_type = other DNA
attcagccagctggacgcaaactggtcctaatacagtcaaagcagaaattaccctaaggtggaaacaaaaccatgtccatcaagacacacctacatccggaggaaattgt

SEQ ID NO: 68465 - DNA, 110 bp, synthetic construct
  source 1..110: mol_type = other DNA
aaggtggaaacaaaaccatgtccatcaagacacacctacatccggaggaaattgttgtccctatccactatgagctagaacgttcaacccctgaatttccaggtttgcca

SEQ ID NO: 68466 - DNA, 110 bp, synthetic construct; identical to SEQ ID NO: 68464
  source 1..110: mol_type = other DNA

SEQ ID NO: 68467 - DNA, 110 bp, synthetic construct; identical to SEQ ID NO: 68465
  source 1..110: mol_type = other DNA

SEQ ID NO: 68468 - DNA, 110 bp, synthetic construct
  source 1..110: mol_type = other DNA
ttctcccaatttcctttgacacacaagcttcccagtttgcaggcaactgaggatgagtttatacaccagggcctgcagaagaaacccttcctcatcccaatgtccacatc

SEQ ID NO: 68469 - DNA, 110 bp, synthetic construct
  source 1..110: mol_type = other DNA
gtcaagtgtacagctagctttttaaaggataacgtttaaagctgtttcttaaaccttcaaagtagttgacaaaaagacatttctaatacacaatctttctttccattatg

SEQ ID NO: 68470 - DNA, 110 bp, synthetic construct
  source 1..110: mol_type = other DNA
tccacttcttggtatgacttccaggggctgctgcctctgggtgtctgcctcaaggtccagtgacatctgcatctcacctcatattctgcaaacaccctccagccttgaac

SEQ ID NO: 68471 - DNA, 110 bp, synthetic construct
  source 1..110: mol_type = other DNA
tccagtgacatctgcatctcacctcatattctgcaaacaccctccagccttgaactctgatttagccaaaaaggccttaacagaatttcccccaaagtcttcaccaactt

SEQ ID NO: 68472 - DNA, 110 bp, synthetic construct
  source 1..110: mol_type = other DNA
gcaaatgtccttcaaaatacagtggtttctcctgcctgcctttagctctctccctcctgaggacaaagtaatctgccgctgctgaagcaagtccacacttcaacacaggt

SEQ ID NO: 68473 - DNA, 110 bp, synthetic construct
  source 1..110: mol_type = other DNA
atatttcaaaaaacaaaaacaaacaaacaaaattctcacgcttaaaaatcacacgaactcggtgtgccagttccttacagaatgactttcccaaatgacatgcaagcatt

SEQ ID NO: 68474 - DNA, 110 bp, synthetic construct; identical to SEQ ID NO: 68473
  source 1..110: mol_type = other DNA

SEQ ID NO: 68475 - DNA, 110 bp, synthetic construct
  source 1..110: mol_type = other DNA
tgtaattttgcataaaggggtccaggaagtcttcctggctaagttcctatctgagcagaaacctgaaggaagtgagagtggagcaggtagctgtctgggagacagagttc

SEQ ID NO: 68476 - DNA, 110 bp, synthetic construct
  source 1..110: mol_type = other DNA
cagaaacctgaaggaagtgagagtggagcaggtagctgtctgggagacagagttccaggcagagggaacagcacgggcaaagcccctcgggtagagaatgctttgtgtgg

SEQ ID NO: 68477 - DNA, 110 bp, synthetic construct
  source 1..110: mol_type = other DNA
actgcctcgtaagacagaatgcagccaagttagccaatgtctcctccatgttttctttctcatctctctctccctcctccccaactccattccttcaacgagcttccata

SEQ ID NO: 68478 - DNA, 110 bp, synthetic construct
  source 1..110: mol_type = other DNA
tttctcatctctctctccctcctccccaactccattccttcaacgagcttccataggccaccaggggccaaacctggggctaggtattaaggatgttcatcactcaagca

SEQ ID NO: 68479 - DNA, 110 bp, synthetic construct
  source 1..110: mol_type = other DNA
atgaatgaataatgcaagagaggacatttaatcatgataatactgataaaggaaagtagctcattgcatggttctctcaaccctttaatatcagctcatggaaaagaata

SEQ ID NO: 68480 - DNA, 110 bp, synthetic construct
  source 1..110: mol_type = other DNA
gcacatttttattttccagttctactgactatctgaggtgttcattaaaatgaaagttgattttcttgtaccattttttttgatagctatctttgatccaagcatagtgt

SEQ ID NO: 68481 - DNA, 110 bp, synthetic construct
  source 1..110: mol_type = other DNA
ttagatggcctgggttacaaatcacattgcgctatttaataacctcatgaccttgggctactaaaggtgtggttacctttaagcttacacctcaatatcttcatagagct

SEQ ID NO: 68482 - DNA, 110 bp, synthetic construct
  source 1..110: mol_type = other DNA
ggctactaaaggtgtggttacctttaagcttacacctcaatatcttcatagagctgatgtaaagattccatgagttacacattaaccaattagaagagtacttagtacat

SEQ ID NO: 68483 - DNA, 110 bp, synthetic construct
  source 1..110: mol_type = other DNA
aagggcaacaatccaagacctaggagattgcatttaatagcaaaatttaaataattaatctataaaataatctttgagctgaggagaaaaactttgaaggtgaaatgatg

SEQ ID NO: 68484 - DNA, 110 bp, synthetic construct
  source 1..110: mol_type = other DNA
ctgatgaagccaactgccatgatgtggtttacgggcttccctaggcagaagcttatgagggaaagaactctgggcagcctccggccaaaagccaaagaggcctttagtcc

SEQ ID NO: 68485 - DNA, 110 bp, synthetic construct
  source 1..110: mol_type = other DNA
gaaaaacacatacagttccaaatttccctgaatgtgcagggaggtaaggatttgtactttgagatagaaaatctgttaaatactgtctagagaaagcctttgttactgaa

SEQ ID NO: 68486 - DNA, 110 bp, synthetic construct
  source 1..110: mol_type = other DNA
ttcatagccatcctgtctgacttctgagtggctgggcaactgcaccatgttctcttgggaagctgaggccagcttggtgatccactacctatttttgatttcccttcctt

SEQ ID NO: 68487 - DNA, 110 bp, synthetic construct
  source 1..110: mol_type = other DNA
gcagttactgctgataaatgaatgctgtttttcttttaaaataaaatctcatgaccttcaaaattacagcccctgtgacatagctaagtgatattgttatgttacttaga

SEQ ID NO: 68488 - DNA, 110 bp, synthetic construct
  source 1..110: mol_type = other DNA
ccagtatattagataacctgcatgaaatttttttaaaaatcctacaaagaaacatactattggaactaactcaagaagaaacagaaaacagacctgaatagacttgtaac

SEQ ID NO: 68489 - DNA, 110 bp, synthetic construct
  source 1..110: mol_type = other DNA
gttttggagaataaactgagcccagctccttcctttttgtactttggggctcaggttcctgcaggatacttgtactgggtcagttctgagtcaggtcagggttattcctg

SEQ ID NO: 68490 - DNA, 110 bp, synthetic construct
  source 1..110: mol_type = other DNA
gtagtagtttgggatgcagagtttaacaggtcaaatctatttcctgcttttctcccaatgaggtaggaggtagctgggccccaggctgagcagctgtggccagccttctg

SEQ ID NO: 68491 - DNA, 110 bp, synthetic construct
  source 1..110: mol_type = other DNA
aaggtcatctcaaaggatggtttgtgatatcatcatgaccagggtggcaatttgcaggtaatgcagggaaggttttagaaaataaaaatggtcctactatgatcttttct

SEQ ID NO: 68492 - DNA, 110 bp, synthetic construct
  source 1..110: mol_type = other DNA
cttaaattttattcttcaaccccacatgtgcacacagtcccagatataggactgacacaaagtttcatgaaactgcagaacctttactaatatatgatgatgctgatatt

SEQ ID NO: 68493 - DNA, 110 bp, synthetic construct
  source 1..110: mol_type = other DNA
agtccatagcagctcagcactctgctgatgttcaggccacaggaactgagtgtatcaatggcaaaggcagctggctgttcctgggtagggtctgaagatcagcactagtg

SEQ ID NO: 68494 - DNA, 110 bp, synthetic construct
  source 1..110: mol_type = other DNA
caatggcaaaggcagctggctgttcctgggtagggtctgaagatcagcactagtgaggcaaagccaggatgtgcccgatggccaagtggactgtctaccctgctgtggga

SEQ ID NO: 68495 - DNA, 110 bp, synthetic construct
  source 1..110: mol_type = other DNA
taagagtatccttcttggagttcccgctgtggtgcagtaggatctgaggagtatctgcagtgtcagaatgcaggttagaccctcagctaaaggatccataggtgagacct

SEQ ID NO: 68496 - DNA, 110 bp, synthetic construct
  source 1..110: mol_type = other DNA
tgcagtgtcagaatgcaggttagaccctcagctaaaggatccataggtgagacctacgccaaagctgagccttgcatccaaccccaggctgggaacttccatatgctgca

SEQ ID NO: 68497 - DNA, 110 bp, synthetic construct
  source 1..110: mol_type = other DNA
tgcaatctgttttctcaaactgaatgcttaatagagtctttagcacatagtaggtactgaataggcatttgttgattatctgatagctatccagataattgtaaatttta

SEQ ID NO: 68498 - DNA, 110 bp, synthetic construct; identical to SEQ ID NO: 68497
  source 1..110: mol_type = other DNA

SEQ ID NO: 68499 - DNA, 110 bp, synthetic construct
  source 1..110: mol_type = other DNA
tgtttgtgtgtattttctttttccccttaggaaaaaaaagcaacatttttcaggtgaacctggaatttatggtcaaatttctgagattatatggtttgctcgaaaactct

SEQ ID NO: 68500 - DNA, 110 bp, synthetic construct
  source 1..110: mol_type = other DNA
gaacctggaatttatggtcaaatttctgagattatatggtttgctcgaaaactctaagtcattttatacagcatatcagttagtacgtgcggactctgtgttgtgtgtta

SEQ ID NO: 68501 - DNA, 110 bp, synthetic construct
  source 1..110: mol_type = other DNA
gtgctccttctgagccaggcatctgggaagctccttctaaacaccatctcaattaatcctcacttcaagcctcagaagcaggcatactaccattatcatctttctataaa

SEQ ID NO: 68502 - DNA, 110 bp, synthetic construct
  source 1..110: mol_type = other DNA
ggcacagagcagtgtaacttacccaaatttatactgatggttactggcagagccagcattcagacttgagttgtctggccaacctcctgtgttcctgatcaccacactta

SEQ ID NO: 68503 - DNA, 110 bp, synthetic construct
  source 1..110: mol_type = other DNA
gcattcagacttgagttgtctggccaacctcctgtgttcctgatcaccacacttagctgtttattacactaaaggtcctgtgtcttggccctggatcctggaatacattt

SEQ ID NO: 68504 - DNA, 110 bp, synthetic construct
  source 1..110: mol_type = other DNA
gatcaatgccaccttatagtcaacctgctactctgtgctgtcctgtcttctactcaactcactgcatcacagatttgtaagattgtttcagctcctagtccaagggctgt

SEQ ID NO: 68505 - DNA, 110 bp, synthetic construct
  source 1..110: mol_type = other DNA
aactcactgcatcacagatttgtaagattgtttcagctcctagtccaagggctgttttgggttttttttgttgttgttgttgttttcttttctttccctttgctttgaag

SEQ ID NO: 68506 - DNA, 110 bp, synthetic construct
  source 1..110: mol_type = other DNA
agatgatgcaagggcacagggagaagggcctctacaaggcaagctgagagaccggcacagaacagattctccctcacagccctcagaaagcatctgctctgctgacacct

SEQ ID NO: 68507 - DNA, 110 bp, synthetic construct
  source 1..110: mol_type = other DNA
gagaaactgactgcttctaaatgatttggccaatatcaaacagctagcaacaagtcccagtagggcaaccagctcccagtcttgcatcccctcagtaggtccccaaggtg

SEQ ID NO: 68508 - DNA, 110 bp, synthetic construct
  source 1..110: mol_type = other DNA
ctccctggcctggattgttgttctaatgcctttcttattactctgcattcagtctggtcctctctgaaccatagcccaccccaaccctgtgtaaagctactcattttttc

SEQ ID NO: 68509 - DNA, 110 bp, synthetic construct
  source 1..110: mol_type = other DNA
ggtcctctctgaaccatagcccaccccaaccctgtgtaaagctactcattttttcctttttgctcctgggataagttccaagctcttttccaaagttctcagaaagtccc

SEQ ID NO: 68510 - DNA, 110 bp, synthetic construct
  source 1..110: mol_type = other DNA
gagagatgtggtctcctcctcttagacagacagccacatggccatttacatcacactgaacttggagctctgacagggcccatgaatgggtctagacccatccagaggag

SEQ ID NO: 68511 - DNA, 110 bp, synthetic construct
  source 1..110: mol_type = other DNA
ctgaacttggagctctgacagggcccatgaatgggtctagacccatccagaggaggggcagacatccagcctgggagagccagggaagtcttcctgggggtgtggctttt

SEQ ID NO: 68512 - DNA, 110 bp, synthetic construct
  source 1..110: mol_type = other DNA
aaaaggaccacaaactgaaaacatttatgaacactacaaaattcagccctggtttgtgcttaaatcatctttttaaaggaacaagaaaataacctaaaacatgttctttg

SEQ ID NO: 68513 - DNA, 110 bp, synthetic construct
  source 1..110: mol_type = other DNA
tcccagaggagtgccacaggaagccaaattgtgttccttctgtgtttgaaagtactttaaatgaaacctgcagctgtttagaatacagttaggaagacttcctgtggtct

SEQ ID NO: 68514 - DNA, 110 bp, synthetic construct
  source 1..110: mol_type = other DNA
aggtgtctagggagttgaagctgacttcatatttcaatggtgtgaagagtcatttcctactatatgggcagaacacgatttcctccccagatgtctcctaggcatttcat

SEQ ID NO: 68515 - DNA, 110 bp, synthetic construct
  source 1..110: mol_type = other DNA
cctactatatgggcagaacacgatttcctccccagatgtctcctaggcatttcatgccctatcaactgttgctgcatacattccacttctaggccaaaaacattatagtt

SEQ ID NO: 68516 - DNA, 110 bp, synthetic construct; identical to SEQ ID NO: 68514
  source 1..110: mol_type = other DNA

SEQ ID NO: 68517 - DNA, 110 bp, synthetic construct; identical to SEQ ID NO: 68515
  source 1..110: mol_type = other DNA

SEQ ID NO: 68518 - DNA, 110 bp, synthetic construct
  source 1..110: mol_type = other DNA
gggcagagatgacctgctgattagagctccctgagctctttgaggtatattagatacaagatggcttggaggatatatgtaaccaaagggtccctttagcctgtttaatg

SEQ ID NO: 68519 - DNA, 110 bp, synthetic construct
  source 1..110: mol_type = other DNA
atgaacatctatattttggtcagtactataaaataaggagccaagatatatcacgttttctttctcttttacaaagggagtagctttggcttcttcttcttcttcttctt

SEQ ID NO: 68520 - DNA, 110 bp, synthetic construct
  source 1..110: mol_type = other DNA
ctcttctctttatttccagagccccctcgctggacaaagaaacctcagagtggtgtgtacagcactgggagcagtggtatcttgttatgcgaggctgaaggagaacctga

SEQ ID NO: 68521 - DNA, 110 bp, synthetic construct
  source 1..110: mol_type = other DNA
atccatgaggatgcgcgtttgatccctggcctcacttgagacttaaggatttggcattgctgtagggtgcagacactgctagaatctgaagtgactatggtataggccag

SEQ ID NO: 68522 - DNA, 110 bp, synthetic construct
  source 1..110: mol_type = other DNA
attgctgtagggtgcagacactgctagaatctgaagtgactatggtataggccagcagctactgctctgattcaatccttagcctggggacttccacatgccatggtgtg

SEQ ID NO: 68523 - DNA, 110 bp, synthetic construct
  source 1..110: mol_type = other DNA
gagttcttaaaagagataagcaagatcttggctgtggtatttgacttcaaatttagcagttaagaatgtgcttcagctacccctggaaactattaattatcatcagtttt

SEQ ID NO: 68524 - DNA, 110 bp, synthetic construct
  source 1..110: mol_type = other DNA
attacatcctggactgaatcgattctcattcctgtcaagtcagttatcttctaactttctattaaactctttataattcctccttcagacacttccctataatgtctttt

SEQ ID NO: 68525 - DNA, 110 bp, synthetic construct
  source 1..110: mol_type = other DNA
gaatcgattctcattcctgtcaagtcagttatcttctaactttctattaaactctttataattcctccttcagacacttccctataatgtcttttacaaggtattatttt

SEQ ID NO: 68526 - DNA, 110 bp, synthetic construct
  source 1..110: mol_type = other DNA
tgtcacattctgttggtgaggatttactcgcatggctacatctagatttaagagggtctataaaatgtactcactagctgcatgaccatatatgcccagggataaggaaa

SEQ ID NO: 68527 - DNA, 110 bp, synthetic construct
  source 1..110: mol_type = other DNA
gtctataaaatgtactcactagctgcatgaccatatatgcccagggataaggaaaacaaatagatttggagagagcattaatttgccgtatttgcccactgtttcacaat

SEQ ID NO: 68528 - DNA, 110 bp, synthetic construct
  source 1..110: mol_type = other DNA
gaaaatatgtaaagtgttatagccaagttctagaatttaaaatacccagaaaaggtgttttctttgaagaaggtcgatatggtcaagaacagcttcatatctttgaattc

SEQ ID NO: 68529 - DNA, 110 bp, synthetic construct
  source 1..110: mol_type = other DNA
atcttccatagacctcccttactcctgctgcaagctcccacctcaaccaaagtcagatcaactgaaaaactctggagttcctttcatggctcagcagaaacgaaccctga

SEQ ID NO: 68530 - DNA, 110 bp, synthetic construct
  source 1..110: mol_type = other DNA
gtcacagccttattaggagggattctttcttttccaggaagcctcagtttttgtttgtacaaccttcaactgcttagatgaggcccactttctttacagagggtaatttc

SEQ ID NO: 68531 - DNA, 110 bp, synthetic construct
  source 1..110: mol_type = other DNA
atagccagttaatcctataacttgaaaatacaagaaaactagtatggaaagtaaacacacttgaacaaactactggaaggagaaggcaagcattgtggtttgtcagtttt

SEQ ID NO: 68532 - DNA, 110 bp, synthetic construct
  source 1..110: mol_type = other DNA
cacacttgaacaaactactggaaggagaaggcaagcattgtggtttgtcagtttttctcctcccctccccatccctaaatgaacttttttgcatctatctgttctaacca

SEQ ID NO: 68533 - DNA, 110 bp, synthetic construct
  source 1..110: mol_type = other DNA
atcttcatatatttcttaaaatgtgatcatctcaccccactgactgagattccagtctttgatgacatgttgattttatacattatggccaccaaacgcaagccagccac

SEQ ID NO: 68534 - DNA, 110 bp, synthetic construct
  source 1..110: mol_type = other DNA
tctttgatgacatgttgattttatacattatggccaccaaacgcaagccagccacttcaacaggctcatggccaaagacaaagctggtgagaaaactggcttatttggat

SEQ ID NO: 68535 - DNA, 110 bp, synthetic construct; identical to SEQ ID NO: 68533
  source 1..110: mol_type = other DNA

SEQ ID NO: 68536 - DNA, 110 bp, synthetic construct; identical to SEQ ID NO: 68534
  source 1..110: mol_type = other DNA

SEQ ID NO: 68537 - DNA, 110 bp, synthetic construct
  source 1..110: mol_type = other DNA
atttttttctgtattctactctggaaaaataaattgtagtccctatgagttcctgcaataaataaatgactccatggtatcacaccagtcagcttgggaaaaatgaggct

SEQ ID NO: 68538 - DNA, 110 bp, synthetic construct
  source 1..110: mol_type = other DNA
caataaataaatgactccatggtatcacaccagtcagcttgggaaaaatgaggcttagctggtctctcacctcacaggagagaagaatcaggatcgaaatcttgacaaca

SEQ ID NO: 68539 - DNA, 110 bp, synthetic construct; identical to SEQ ID NO: 68537
  source 1..110: mol_type = other DNA

SEQ ID NO: 68540 - DNA, 110 bp, synthetic construct; identical to SEQ ID NO: 68538
  source 1..110: mol_type = other DNA

SEQ ID NO: 68541 - DNA, 110 bp, synthetic construct
  source 1..110: mol_type = other DNA
ttttttttttttctactgaattttcttgccctaattggtagctggctgatatcaacagcctttgctatagagtatatacctaggaggcaacaggaaaaggtaggaaacac

SEQ ID NO: 68542 - DNA, 110 bp, synthetic construct
  source 1..110: mol_type = other DNA
gactttgggcagaacaaaggaggctgtagggacaggtgattcaagtcctcataaatggctgttggaaggtttaagacacaagatgtctcaccttttaaagctgtatagaa

SEQ ID NO: 68543 - DNA, 110 bp, synthetic construct
  source 1..110: mol_type = other DNA
tggctgttggaaggtttaagacacaagatgtctcaccttttaaagctgtatagaagcaaaagtattcacctatagaagcagtatatatgttggatactatgttgggcaaa

SEQ ID NO: 68544 - DNA, 110 bp, synthetic construct
  source 1..110: mol_type = other DNA
tcataatgatgattttggggtcaattaccatttgggggcagattagaatctgatttgaagctgaaaaattccaccccttggcgataatcccgtcaactttccaatcctaa

SEQ ID NO: 68545 - DNA, 110 bp, synthetic construct
  source 1..110: mol_type = other DNA
tgaagctgaaaaattccaccccttggcgataatcccgtcaactttccaatcctaaatagggcaagtttcagagaagagcatttctcattttacagcctatctgaatacta

SEQ ID NO: 68546 - DNA, 110 bp, synthetic construct; identical to SEQ ID NO: 68544
  source 1..110: mol_type = other DNA

SEQ ID NO: 68547 - DNA, 110 bp, synthetic construct; identical to SEQ ID NO: 68545
  source 1..110: mol_type = other DNA

SEQ ID NO: 68548 - DNA, 110 bp, synthetic construct
  source 1..110: mol_type = other DNA
caggagggtagggctcaaagtgattacgttcaggctgaacagtgagttgagaggacttcagacacttaagactagctcgggcaacaacatttctcacctacgttgccaca

SEQ ID NO: 68549 - DNA, 110 bp, synthetic construct
  source 1..110: mol_type = other DNA
cttcagacacttaagactagctcgggcaacaacatttctcacctacgttgccacagtggcctccttgctggtttctgcatttgcctctttgtctcctttgttcctgagtg

SEQ ID NO: 68550 - DNA, 110 bp, synthetic construct
  source 1..110: mol_type = other DNA
ctaacaaattactctggatgtagtggcttaaaactggcttaacacccagtttctgagtggaaaccaggagcagggtctctcttgaggttgtccacagctactgatggggg

SEQ ID NO: 68551 - DNA, 110 bp, synthetic construct
  source 1..110: mol_type = other DNA
agtggaaaccaggagcagggtctctcttgaggttgtccacagctactgatgggggccgcagccatgtcacagctcagttggggcaggatggtccccttccaggcttggct

SEQ ID NO: 68552 - DNA, 110 bp, synthetic construct; identical to SEQ ID NO: 68550
  source 1..110: mol_type = other DNA

SEQ ID NO: 68553 - DNA, 110 bp, synthetic construct; identical to SEQ ID NO: 68551
  source 1..110: mol_type = other DNA

SEQ ID NO: 68554 - DNA, 110 bp, synthetic construct
  source 1..110: mol_type = other DNA
gaagcagccagtgactgcttgatttctttagaatgagagctcctctcctgcagtcctgaccttagtgcctaggtgcccagagaaaggggtccaatatctgtaaggtttat

SEQ ID NO: 68555 - DNA, 110 bp, synthetic construct
  source 1..110: mol_type = other DNA
aaactgtggtctgtccacctcaacctgaaaaatgagtttttagacataagctccttgctgtctgaatgtggtactcttggcattgaaataagtctgaggtgaatgaaata

SEQ ID NO: 68556 - DNA, 110 bp, synthetic construct
  source 1..110: mol_type = other DNA
tgctgtctgaatgtggtactcttggcattgaaataagtctgaggtgaatgaaataatacgacttccatttatttaatatattcatatgaacatttggggtcttgcaggca

SEQ ID NO: 68557 - DNA, 110 bp, synthetic construct; identical to SEQ ID NO: 68555
  source 1..110: mol_type = other DNA

SEQ ID NO: 68558 - DNA, 110 bp, synthetic construct; identical to SEQ ID NO: 68556
  source 1..110: mol_type = other DNA

SEQ ID NO: 68559 - DNA, 110 bp, synthetic construct
  source 1..110: mol_type = other DNA
tgtgggcttatttcagggggtttatggtgctgggcagctattcctcaggagttcagcaccccccatggactggagtagctgtctggatcacttagaaaccaagatgctct

SEQ ID NO: 68560 - DNA, 110 bp, synthetic construct
  source 1..110: mol_type = other DNA
ggtgctgggcagctattcctcaggagttcagcaccccccatggactggagtagctgtctggatcacttagaaaccaagatgctcttccccagggcagcctgactcggaag

SEQ ID NO: 68561 - DNA, 110 bp, synthetic construct
  source 1..110: mol_type = other DNA
cccagggcgttggacggccgccatctttccggccccgcgctgctggggcagttcgcccttcgctgcagtcgggagcttcgaccgtccggtggagcctggatttttacctc

SEQ ID NO: 68562 - DNA, 110 bp, synthetic construct
  source 1..110: mol_type = other DNA
cccttcgctgcagtcgggagcttcgaccgtccggtggagcctggatttttacctctgatgcataggggacctccagacagcctggctctggtggctttggcctgaggtcg

SEQ ID NO: 68563 - DNA, 110 bp, synthetic construct
  source 1..110: mol_type = other DNA
agaaaggagggaggaaaggaaactaggaaactaactgggctgggttagtacaaggtctaatatgccttatttttaaagaacattttattttaattttcctttcaacatac

SEQ ID NO: 68564 - DNA, 110 bp, synthetic construct; identical to SEQ ID NO: 68563
  source 1..110: mol_type = other DNA

SEQ ID NO: 68565 - DNA, 110 bp, synthetic construct
  source 1..110: mol_type = other DNA
atacataggaaaaaagccaataggatcagagtgaaaaattaaataagcacaagattgggattaaatggaacaaaataaggagctttcagagctaagtcagtgagagtgag

SEQ ID NO: 68566 - DNA, 110 bp, synthetic construct
  source 1..110: mol_type = other DNA
tgggattaaatggaacaaaataaggagctttcagagctaagtcagtgagagtgagtggctggcaaactcatatatggagaagattttttttctgtcttccaaggaggcat

SEQ ID NO: 68567 - DNA, 110 bp, synthetic construct
  source 1..110: mol_type = other DNA
atctccattaaggcttttggttcagtgctccaaatttagattccaatgagaaagcaaactaatactccaccattgatcctgggcccattcttttgtagctgattgacaat

SEQ ID NO: 68568 - DNA, 110 bp, synthetic construct
  source 1..110: mol_type = other DNA
aaactaatactccaccattgatcctgggcccattcttttgtagctgattgacaattctgctggatggtcatttttgaaattattatagacatctaagataagcatcatat

SEQ ID NO: 68569 - DNA, 110 bp, synthetic construct
  source 1..110: mol_type = other DNA
ttatattctaccactgctgagcaatcaaaattgtttaatatattggaaaaaaaccatatttttaaaggcaatagtgaagtccgtgtcctgcttctaatgctcacttcatg

SEQ ID NO: 68570 - DNA, 110 bp, synthetic construct
  source 1..110: mol_type = other DNA
atgaaaaccgaacaggctgccaggatattcccatcatcaaactggaatggcattccccatgggctgtcatccctgtcttcctcgcaatgttgggcatcatcgccactata

SEQ ID NO: 68571 - DNA, 110 bp, synthetic construct
  source 1..110: mol_type = other DNA
cccatgggctgtcatccctgtcttcctcgcaatgttgggcatcatcgccactatatttgtcatggccactttcatccgctacaatgacactcccatcgtccgggcatctg

SEQ ID NO: 68572 - DNA, 110 bp, synthetic construct
  source 1..110: mol_type = other DNA
gagaagatgccagcaacagtacgtgaaaagaattaacaaagaccgttctgttaaagggatcttacacatacctgttttccaaatatagcttggctctggcctgtttggca

SEQ ID NO: 68573 - DNA, 110 bp, synthetic construct
  source 1..110: mol_type = other DNA
gggatcttacacatacctgttttccaaatatagcttggctctggcctgtttggcaaacctccccttcccacttattctatgcactgtgccacagccctccaagagactaa

SEQ ID NO: 68574 - DNA, 110 bp, synthetic construct
  source 1..110: mol_type = other DNA
accatgctccattcccaggcccaaggcagacatcactagtcaatcgttttccactgagctaaaactgagcattacaattcctcttgaaagataagcattatccataagcc

SEQ ID NO: 68575 - DNA, 110 bp, synthetic construct
  source 1..110: mol_type = other DNA
ctgatcagttttggtagaaggatgctccctaaagtgttcattatctgaccctctcttccagcttgccaggcgtacaggtgtggcaagtggaaatcaggctagagtgaagc

SEQ ID NO: 68576 - DNA, 110 bp, synthetic construct
  source 1..110: mol_type = other DNA
cagcatgcgaacacagcaggactcaatcaaccacaaggaagccagctaagatcgcagtgttcacagacagtacaatttgtgcatttctgttttctaacttgcggtagcac

SEQ ID NO: 68577 - DNA, 110 bp, synthetic construct
  source 1..110: mol_type = other DNA
tcgcctgcatctccttctgccacatctgggcggtggtgccatgcatcaagagctacctgatcgagatccagtgcatcagccatatctactcactctgcatccgcaccttc

SEQ ID NO: 68578 - DNA, 110 bp, synthetic construct
  source 1..110: mol_type = other DNA
cctgatcgagatccagtgcatcagccatatctactcactctgcatccgcaccttctgcaacccagtctttgccgccctgggtcaggtctgcagcaacatcaaggtgatgc

SEQ ID NO: 68579 - DNA, 110 bp, synthetic construct
  source 1..110: mol_type = other DNA
cctcattaggcaacatctggccaccctcatcttctcactccctgcaagacccttttgccttggtttatctaccagtaaaatgggtgaatcacaggatgtgtacagcacag

SEQ ID NO: 68580 - DNA, 110 bp, synthetic construct
  source 1..110: mol_type = other DNA
tgccttggtttatctaccagtaaaatgggtgaatcacaggatgtgtacagcacaggcagaggaagggctctgatccacagctgttgggccagccctttcactgcccagtg

SEQ ID NO: 68581 - DNA, 110 bp, synthetic construct
  source 1..110: mol_type = other DNA
cccggaggtcttcccaagcaggggtaagatgacttgacttcaggcccaagacaacctcaattttgcttatgtctattacctatcttttttgaatgcttgtagtcagcatt

SEQ ID NO: 68582 - DNA, 110 bp, synthetic construct
  source 1..110: mol_type = other DNA
tcctcccttccacccacaaaatgtctttcaaatgaacaacactgagcgttttgtgtggtgaatcagacaaggaccttgcctcatccactagtggaggagttaagacacat

SEQ ID NO: 68583 - DNA, 110 bp, synthetic construct
  source 1..110: mol_type = other DNA
tggtgaatcagacaaggaccttgcctcatccactagtggaggagttaagacacataatagttataaaaatataagcggggtgggtcagagctatacaaaagctaataata

SEQ ID NO: 68584 - DNA, 110 bp, synthetic construct
  source 1..110: mol_type = other DNA
atgcccataagaagggacttccatgtcctgctgtggttgtcagctttgtcaagaatggtgctgtcagggtggtaagcatcaagtcaggggagtcagggcccagcacagtt

SEQ ID NO: 68585 - DNA, 110 bp, synthetic construct
  source 1..110: mol_type = other DNA
ttaagtgcctattgtatgccaagcactgagatggtaggtatattaggccttctatcctcaaggagcttagtctgttagggtggaaatgagtctgtcatcagctaattatg

SEQ ID NO: 68586 - DNA, 110 bp, synthetic construct
  source 1..110: mol_type = other DNA
tcccattctaagccctgagtatgactcagttctgctgtgtacctgggaggcttgtgttgtgtttatcatgtgatttggtggtacaaagagtttgttggcgtttattttga

SEQ ID NO: 68587 - DNA, 110 bp, synthetic construct
  source 1..110: mol_type = other DNA
gttgtgtttatcatgtgatttggtggtacaaagagtttgttggcgtttattttgagggggcatctgtagcactttaaacatacaattctcaccctaaccacagtcttcgt

SEQ ID NO: 68588 - DNA, 110 bp, synthetic construct; identical to SEQ ID NO: 68586
  source 1..110: mol_type = other DNA

SEQ ID NO: 68589 - DNA, 110 bp, synthetic construct; identical to SEQ ID NO: 68587
  source 1..110: mol_type = other DNA

SEQ ID NO: 68590 - DNA, 110 bp, synthetic construct
  source 1..110: mol_type = other DNA
ctgattggccaagagactctggggaacttccaggggtggaaggaggaaataaaattgggaagctgagctagtggcttattggggggtgggggggattttatggcttactt

SEQ ID NO: 68591 - DNA, 110 bp, synthetic construct
  source 1..110: mol_type = other DNA
cttgagaagcagaagggagagaagcccgtagattcccctaaaatcagtgacaaggtctacttccctgcctaccgctggccacagcttcactctgaccttgggcatctggt

SEQ ID NO: 68592 - DNA, 110 bp, synthetic construct
  source 1..110: mol_type = other DNA
agggagcacccagtcactgtcccgagggaatgcatgatgcaagtgcctgagtatcttgcccaggaaggtccttgccctgagtcccctgttgatttagggctttggctgaa

SEQ ID NO: 68593 - DNA, 110 bp, synthetic construct
  source 1..110: mol_type = other DNA
ttgcccaggaaggtccttgccctgagtcccctgttgatttagggctttggctgaaggccctgcagaagtagaccacccccaaacacagggagagttgggggcctgcactg

SEQ ID NO: 68594 - DNA, 110 bp, synthetic construct
  source 1..110: mol_type = other DNA
aaaagcagccccttttcccctttaggcacatggctgactttgactccagcttcaagatctctcactttgcacagccctccagttgcaagcctgccgacacaaattcccta

SEQ ID NO: 68595 - DNA, 110 bp, synthetic construct
  source 1..110: mol_type = other DNA
cctggagtggagtagtttcttacctgctgtgtgaccttggacaagaccctttgcctctctgagccttgatttcttcaactgtaaaatggaggcgggataatcaaaaggcc

SEQ ID NO: 68596 - DNA, 110 bp, synthetic construct
  source 1..110: mol_type = other DNA
tctctgagccttgatttcttcaactgtaaaatggaggcgggataatcaaaaggcctgtctcctagggtggttgtggggagatgcacagaaacagagcacaatttctatgg

SEQ ID NO: 68597 - DNA, 110 bp, synthetic construct
  source 1..110: mol_type = other DNA
acaacacgttgtgcaacgtgcaccatgctgttttcactattacttagagagagctgcagttaagcccgatgacggcgagagagcatacagagaagtgggttctttcacat

SEQ ID NO: 68598 - DNA, 110 bp, synthetic construct
  source 1..110: mol_type = other DNA
gcagttaagcccgatgacggcgagagagcatacagagaagtgggttctttcacataacggcttttgacttcataaaactgtctcctaaagctgtctggagctgaggatga

SEQ ID NO: 68599 - DNA, 110 bp, synthetic construct
  source 1..110: mol_type = other DNA
atgagcattaaggaagtgcaggtagctcagtcctgtggagcaagggccataagaactgagagatgagtctggggagagtgcaaagtgaatcatgaagggcttcttaaagc

SEQ ID NO: 68600 - DNA, 110 bp, synthetic construct
  source 1..110: mol_type = other DNA
ggcactgacccgctggaaaggtgaagtctgaggtaaaatagcccctcagttggttcaaatccccaaacacagaaaagctggagctactttatgcaacagggaagaagagt

SEQ ID NO: 68601 - DNA, 110 bp, synthetic construct
  source 1..110: mol_type = other DNA
ccatctcaaagggattttagtgttagagtcctaccaagtgtttagcaactttacattgggttcatccacacacatatcaatcagacacttatatgctctgtaagtgcccc

SEQ ID NO: 68602 - DNA, 110 bp, synthetic construct
  source 1..110: mol_type = other DNA
ctttcatgtctttttaatgatagctcatcttttgttctccagcaagacacccaaatatctgtgtgtcaggcttcatcttaacgaagggactttctgttctcacacacctt

SEQ ID NO: 68603 - DNA, 110 bp, synthetic construct
  source 1..110: mol_type = other DNA
gatgaattcactgtcatttgaaatgagatataataatgtcataaagtatagcaggagtactggaagaagtttctggtctcattggattatgccaaataaatattagctgt

SEQ ID NO: 68604 - DNA, 110 bp, synthetic construct
  source 1..110: mol_type = other DNA
catgcaattccctgtgctgaatgctcttccctactcttgatcccagctccagggccatgtctccacagagcctccctagcattggcagccttcagtgttctgtcgtttct

SEQ ID NO: 68605 - DNA, 110 bp, synthetic construct
  source 1..110: mol_type = other DNA
catgtctccacagagcctccctagcattggcagccttcagtgttctgtcgtttcttcaaattttcatgcattttctatttcagtccacacctcactgggctgcctttttt

SEQ ID NO: 68606 - DNA, 110 bp, synthetic construct
  source 1..110: mol_type = other DNA
ttctctgggccccggggggtaggcagggaagcccaggcctagagctggcccccacttccccaacacctttgccttcctgccatcagcatctgcccatcacgcctgccttt

SEQ ID NO: 68607 - DNA, 110 bp, synthetic construct; identical to SEQ ID NO: 68606
  source 1..110: mol_type = other DNA

SEQ ID NO: 68608 - DNA, 110 bp, synthetic construct
  source 1..110: mol_type = other DNA
caagaatgtccactccacttatgtggagacaggttaaggggaagacggactgggggtttgggatagaaatgttctaaaatcaggttgtggtggagttccagctgtgctca

SEQ ID NO: 68609 - DNA, 110 bp, synthetic construct
  source 1..110: mol_type = other DNA
gagacaggttaaggggaagacggactgggggtttgggatagaaatgttctaaaatcaggttgtggtggagttccagctgtgctcagtggtaacgaacctgactagtatcc

SEQ ID NO: 68610 - DNA, 110 bp, synthetic construct
  source 1..110: mol_type = other DNA
aggtgtggaggcaggaaaacagtgcagcttatgctgtaagtaaaaagcagtccaaggagttccctttgtggctcagcagttaacaatcctgactaggatccatgaggatg

SEQ ID NO: 68611 - DNA, 110 bp, synthetic construct
  source 1..110: mol_type = other DNA
taaaatgggaacaacacctgtgctttcctcaccatgtcctcctggacctctccctttatcgagttaattcctcatcatagtgcaagatgaagccccagtctcattttctc

SEQ ID NO: 68612 - DNA, 110 bp, synthetic construct
  source 1..110: mol_type = other DNA
ttatcgagttaattcctcatcatagtgcaagatgaagccccagtctcattttctcagaggacttctccagccacaaacaggtcaggcacctgtcagaagctcttagaact

SEQ ID NO: 68613 - DNA, 110 bp, synthetic construct
  source 1..110: mol_type = other DNA
gctcagagggcagcaagagagacctgtctgtgccctgaggcttactccctgattgccaccccaccagaggtggcgaaggtgcctggagcctggcaaggtgttggttcaca

SEQ ID NO: 68614 - DNA, 110 bp, synthetic construct
  source 1..110: mol_type = other DNA
ttatatagttaatcgtttcctgagatcccttgtgtggcaggcatgttactaggcccgaaggagggagagaagagctgtcattcgggaagcaccacattttcttcaggacg

SEQ ID NO: 68615 - DNA, 110 bp, synthetic construct
  source 1..110: mol_type = other DNA
cgaaggagggagagaagagctgtcattcgggaagcaccacattttcttcaggacgcttgggacacatgagaaattttagaccagagccctgttgcacaaggtgaacgtgc

SEQ ID NO: 68616 - DNA, 110 bp, synthetic construct
  source 1..110: mol_type = other DNA
gaggtgacagccagcctggcgggcagggaaggccatgcccttgaggagactttgctctggtctggagtgcaccttgagttcatgggagttgtagctgagaagctgccctt

SEQ ID NO: 68617 - DNA, 110 bp, synthetic construct
  source 1..110: mol_type = other DNA
tctggtctggagtgcaccttgagttcatgggagttgtagctgagaagctgcccttttcccacccaccttgggggatgggccacagaccctgggtgggaaccagagccatc

SEQ ID NO: 68618 - DNA, 110 bp, synthetic construct; identical to SEQ ID NO: 68616
  source 1..110: mol_type = other DNA

SEQ ID NO: 68619 - DNA, 110 bp, synthetic construct; identical to SEQ ID NO: 68617
  source 1..110: mol_type = other DNA

SEQ ID NO: 68620 - DNA, 110 bp, synthetic construct
  source 1..110: mol_type = other DNA
accagggcatgtgtccatcacacagtagtggaccagaccctccgcctggcattcaaagctccagaaaccatgctctcacccatccaccctcttactcctcattccctctt

SEQ ID NO: 68621 - DNA, 110 bp, synthetic construct
  source 1..110: mol_type = other DNA
aagctccagaaaccatgctctcacccatccaccctcttactcctcattccctcttcagcgttcccacagacacccacatagcaacttccactgtgttcccccccaattca

SEQ ID NO: 68622 - DNA, 110 bp, synthetic construct
  source 1..110: mol_type = other DNA
aagcagccactagccacacggggctgtttcagtgaaaaatttggtcctcggtcacattagccctgtttcaacttctctacagctgtatggctggtggctactgtattaga

SEQ ID NO: 68623 - DNA, 110 bp, synthetic construct
  source 1..110: mol_type = other DNA
ttcgagtggctgccctctacacagacccctggatctgtcactaagctgcagtgcggctggcgggcagactgtgcaaacaggctgaggatggaatgctaagtgctgtggtg

SEQ ID NO: 68624 - DNA, 110 bp, synthetic construct
  source 1..110: mol_type = other DNA
agttaatgtacaaatagaaactagatcttgtgggcaggctgcatatctgggctttgataaaaagcagcaatatctgtaattaagtggcaccattatcttacacaggatgg

SEQ ID NO: 68625 - DNA, 110 bp, synthetic construct
  source 1..110: mol_type = other DNA
gataaaaagcagcaatatctgtaattaagtggcaccattatcttacacaggatggagttttggaaagcattttgcaaaggctgaagctgctccaatgctcttactctttc

SEQ ID NO: 68626 - DNA, 110 bp, synthetic construct
  source 1..110: mol_type = other DNA
cgaacacactgaacgaccaaaccctggagaatgtcaccgtgcagatggagcccaccgaggcctatgaggtactgtgctacgttcctgcccggagcctcccttacaaccag

SEQ ID NO: 68627 - DNA, 110 bp, synthetic construct
  source 1..110: mol_type = other DNA
cgaggcctatgaggtactgtgctacgttcctgcccggagcctcccttacaaccagcctgggacctgctacacactggtggcactgcccaaggaagaccccactgcaggtg

SEQ ID NO: 68628 - DNA, 110 bp, synthetic construct
  source 1..110: mol_type = other DNA
tatgggaaatggcacggccccacccccccatctctagaccgtgagcacccacaatgactgagctcttatctacacagagaccccaaagatcagacaccaacacatcaaca

SEQ ID NO: 68629 - DNA, 110 bp, synthetic construct
  source 1..110: mol_type = other DNA
gactgagctcttatctacacagagaccccaaagatcagacaccaacacatcaacaaggagagaacttcttcctctcgaatccattgctgtgatgttagaccaaagccaat

SEQ ID NO: 68630 - DNA, 110 bp, synthetic construct; identical to SEQ ID NO: 68628
  source 1..110: mol_type = other DNA

SEQ ID NO: 68631 - DNA, 110 bp, synthetic construct; identical to SEQ ID NO: 68629
  source 1..110: mol_type = other DNA

SEQ ID NO: 68632 - DNA, 110 bp, synthetic construct
  source 1..110: mol_type = other DNA
gcctaacatgggaagagtgaagaattgaagcaggggaagcgatctcaaaatgggtgtctgggtctgtggtcctgtggacagtatgggccctacctgcaagcaatcagagc

SEQ ID NO: 68633 - DNA, 110 bp, synthetic construct
  source 1..110: mol_type = other DNA
ggtatactctcgtctcttctaattaccacccatagatttgtaacctgaaaatattaaacattaaagctctgttttcttgaaagtttcagccactggagccatctgagccc

SEQ ID NO: 68634 - DNA, 110 bp, synthetic construct
  source 1..110: mol_type = other DNA
aaacattaaagctctgttttcttgaaagtttcagccactggagccatctgagccctttagagtcggccagagcagtttccgtattaacgcagtttgggccatccctattt

SEQ ID NO: 68635 - DNA, 110 bp, synthetic construct
  source 1..110: mol_type = other DNA
gggttagggatttggtgttgcctcaagctgtagcataggtcacagatgccactcagttctggtgttgctatggctgagcatatgcctcagctgtagctctcattcagtcc

SEQ ID NO: 68636 - DNA, 110 bp, synthetic construct
  source 1..110: mol_type = other DNA
tgttgcctcaagctgtagcataggtcacagatgccactcagttctggtgttgctatggctgagcatatgcctcagctgtagctctcattcagtccctagcctgggaactt

SEQ ID NO: 68637 - DNA, 110 bp, synthetic construct
  source 1..110: mol_type = other DNA
ttacctcctaattaagcactgtgtaactctgagtacatactgagtagttcagtatatttgggtaaaccccatactgaaagatttttcagggaacataaaagggctttata

SEQ ID NO: 68638 - DNA, 110 bp, synthetic construct
  source 1..110: mol_type = other DNA
ttctccagactatttgtatttttcttccatagagcttagcacaatttgtaattctacacataaaactacacttacttgttgtatatttctctcccattctacactgtgat

SEQ ID NO: 68639 - DNA, 110 bp, synthetic construct
  source 1..110: mol_type = other DNA
acacataaaactacacttacttgttgtatatttctctcccattctacactgtgatgcttgtgtgtttaatcgctctcttagcttagcgaaaaaattaagcaggttttgtt

SEQ ID NO: 68640 - DNA, 110 bp, synthetic construct
  source 1..110: mol_type = other DNA
ccaaattcaatttctgaggatgtttctcaggcactgcaaaagaaaaaagaaaaatgtgtgagtttgctgtggacaagaaatagtctttttcatagcagtgcagtcaaaat

SEQ ID NO: 68641 - DNA, 110 bp, synthetic construct
  source 1..110: mol_type = other DNA
gtgtgagtttgctgtggacaagaaatagtctttttcatagcagtgcagtcaaaatgatagaaaatgctcctttagtatttggcattgctacaatatcatttaattccttg

SEQ ID NO: 68642 - DNA, 110 bp, synthetic construct
  source 1..110: mol_type = other DNA
gatatgtttaaagctgggagggaggaggaggcagggctgaaggtgattctcagattggaaccaggtaggaacttggttgtgccctgagggcctcctccccctagttgttc

SEQ ID NO: 68643 - DNA, 110 bp, synthetic construct
  source 1..110: mol_type = other DNA
actccttgttgattgcttagaagcaaaacgctaagctgcttctaacagttccatgcaagtgaggaatcctgaaggtgttccatctcttggttgtatttcacaacaaaaat

SEQ ID NO: 68644 - DNA, 110 bp, synthetic construct
  source 1..110: mol_type = other DNA
tgcttcctgctctgattaggtcacctcaaagctggcaatgcttgtttattcccttaacattgccatattgccaagtgcttatgacaaatggcaggtacttcattttatac

SEQ ID NO: 68645 - DNA, 110 bp, synthetic construct
  source 1..110: mol_type = other DNA
gtggtcagccacccccggtgtgtgtgggactgtgtccaaagcaactatcacttttatgtcagggatctggtgctttggccgccaaccagaacgcatctgtgccagggcct

SEQ ID NO: 68646 - DNA, 110 bp, synthetic construct
  source 1..110: mol_type = other DNA
ggacagaagtaggagtgagtgcgctctggagggtatgatcctagggagcgagctcaggaccctggcagaaaacttgtctctgcctggtgacccaccccgtggccatccaa

SEQ ID NO: 68647 - DNA, 110 bp, synthetic construct
  source 1..110: mol_type = other DNA
tctctgaattaaagcaagggatgccgctaagttctcatgtgaacctggccaaatccctctctccttccagcactagctcgcatcttgaggtagagggtatcctaagcctt

SEQ ID NO: 68648 - DNA, 110 bp, synthetic construct
  source 1..110: mol_type = other DNA
ttgccagtcctgctacagccacgaaggccagggcctcacaatgacctacagggggcgaactgagctactgtgaaagctcatcacaaatagagaagcgtgtgtgtgtgtgt

SEQ ID NO: 68649 - DNA, 110 bp, synthetic construct
  source 1..110: mol_type = other DNA
cgaactgagctactgtgaaagctcatcacaaatagagaagcgtgtgtgtgtgtgtgcgtgcgcgcgcgcaacaaagaggcgtatcaaagggtcagattcccattccaccc

SEQ ID NO: 68650 - DNA, 110 bp, synthetic construct
  source 1..110: mol_type = other DNA
acccagagatgctgagccctgggtacagggggcatttgttgagctggaagcccatgtcccgacctgccaggagtgcagggatgacattgggcttagggataagacacact

SEQ ID NO: 68651 - DNA, 110 bp, synthetic construct
  source 1..110: mol_type = other DNA
aaaaactcaggggagacctaactagattccttagctatttgacaagccattccatggaagagggaacagtctatattacctcacttggcataactgagaacagtaggaag

SEQ ID NO: 68652 - DNA, 110 bp, synthetic construct
  source 1..110: mol_type = other DNA
aaatgtaacaaaataaaagttattgtaaaagctgacgaaatagaataaagcattctggatctcagtgaaatgcttttatctgataggaggagggaaatctgttcccatat

SEQ ID NO: 68653 - DNA, 110 bp, synthetic construct
  source 1..110: mol_type = other DNA
atgccacatttgcagccccaaagaaaagaaaaaaaaaaaaagctagagcaaaaggcacacccatctgaaggagtagccacagtgacatgctggtaaaagtttaacaaaca

SEQ ID NO: 68654 - DNA, 110 bp, synthetic construct
  source 1..110: mol_type = other DNA
gaagaattgctaatcttgattaatcaggacttttggtaggaccacattttctagcaggcaggattactttgctctgaaggtctgtattcaggtatgctgctttcctttct

SEQ ID NO: 68655 - DNA, 110 bp, synthetic construct
  source 1..110: mol_type = other DNA
aggcaggattactttgctctgaaggtctgtattcaggtatgctgctttcctttctgcctcagaccaaaaaaggttggtgctagaggtgggtcagccaaacttattatagt

SEQ ID NO: 68656 - DNA, 110 bp, synthetic construct
  source 1..110: mol_type = other DNA
ccacactccaacctcaatcctgggaaaaaaaaaaacaaaaaaacagctttatttcagtctctcaaacatatcatgattcctcctacctaacggtgtttgcacatgccatt

SEQ ID NO: 68657 - DNA, 110 bp, synthetic construct
  source 1..110: mol_type = other DNA
ttgagtcccatagctcccaagatgtgccacattgggaactcctcacctgtgcaaatcttgtccccaccgttctacacagctgcttccactgcagccaggaatgtgctctc

SEQ ID NO: 68658 - DNA, 110 bp, synthetic construct
  source 1..110: mol_type = other DNA
tcttgtccccaccgttctacacagctgcttccactgcagccaggaatgtgctctctgtgccttgggttgaccagacccatcccttcctgccttgcatggaacacctttct

SEQ ID NO: 68659 - DNA, 110 bp, synthetic construct
  source 1..110: mol_type = other DNA
atgggccccatgtctgtgggccaaaaactctgaggctggatagtctcttctgacaaaaagcccaaaccctgaatggttcttgtatttacaaaaatgtttgcaaacctctc

SEQ ID NO: 68660 - DNA, 110 bp, synthetic construct
  source 1..110: mol_type = other DNA
ggctgcagggcttctgaacattgtctacaggctaagcttgtgtgggccaggctgtaggcagccccatagggctggttggaagtaacagaattcctgcactgtcccctgtc

SEQ ID NO: 68661 - DNA, 110 bp, synthetic construct
  source 1..110: mol_type = other DNA
attttgaaaaacatcccaggcaaatctgatgctgcacacatgtatgtcaccagcctcacctaagcaccctaagaactctagtctacactttcatgtattggcagaaggtc

SEQ ID NO: 68662 - DNA, 110 bp, synthetic construct
  source 1..110: mol_type = other DNA
cctcactggtccactgtgtagaagtcatcccagcctcctgggaagtccacagcgttgtcccttccctccgcccgcccagtgggcccagctctgtgtgtggaggaaaggag

SEQ ID NO: 68663 - DNA, 110 bp, synthetic construct
  source 1..110: mol_type = other DNA
gtgcctctctactttctattttagcaccaagcgaagtatctgtattcattcattcatttaaccttcccaataggcctaataagtatcttcctcttttttttttttttttt

SEQ ID NO: 68664 - DNA, 110 bp, synthetic construct
  source 1..110: mol_type = other DNA
atttaaccttcccaataggcctaataagtatcttcctctttttttttttttttttagctgcaccatgcagctgcttgatgtgggatctcagttcccacccagaccaggga

SEQ ID NO: 68665 - DNA, 110 bp, synthetic construct
  source 1..110: mol_type = other DNA
tttagatgcagagaaggcttggtcctggctttgtggcactctccttccttccctgtgccaaggtgtttctccttagctctggaagaagcatcagagcatgattgttaagt

SEQ ID NO: 68666 - DNA, 110 bp, synthetic construct
  source 1..110: mol_type = other DNA
aacaccctaggacatcctaaccaggcttgcttcatgtaccagccttagaaaaggcagtggagatctggagatccatggccaatcccaaagagcaggcaggaccatgaagg

SEQ ID NO: 68667 - DNA, 110 bp, synthetic construct
  source 1..110: mol_type = other DNA
tgcagggcagagggtaggtaaaaacacagtgagcatccacgcaaggtgcacccctcggaagccttattcctttccattctggcttttgtttctatgtcctgggcccccag

SEQ ID NO: 68668 - DNA, 110 bp, synthetic construct
  source 1..110: mol_type = other DNA
cggaagccttattcctttccattctggcttttgtttctatgtcctgggcccccagtctatgtgccaacacatttccacctttgtgtcaactcttctctccaaaaagcctt

SEQ ID NO: 68669 - DNA, 110 bp, synthetic construct
  source 1..110: mol_type = other DNA
cccaggcctcccttgatggctcttgttggcctggaaacacagcaggtgctcaataagtgcttgggcaacctttcactgctcggtctccagagatcagatgaagaataaac

SEQ ID NO: 68670 - DNA, 110 bp, synthetic construct
  source 1..110: mol_type = other DNA
aataattaaatagggtattatctagggcaatgcttctgttaccgagtccaaacttatactgttcactgcatgaccggccaatacatcaagagatgaggtgttgggacaag

SEQ ID NO: 68671 - DNA, 110 bp, synthetic construct
  source 1..110: mol_type = other DNA
tgtggtgtatgcagacactctaggtattaaaagaagagatttttcaatgtatatattattttttaaaatcctgcatcacaaccacctctgggtgcaaatctatttcaact

SEQ ID NO: 68672 - DNA, 110 bp, synthetic construct
  source 1..110: mol_type = other DNA
cccattcagttatctccatttctcaggtcagaagaaaaaatcctgaggttcagagagcttcagagacagagccagttcatacggcagaacccaaatctgaatgtaggtct

SEQ ID NO: 68673 - DNA, 110 bp, synthetic construct
  source 1..110: mol_type = other DNA
agcttcagagacagagccagttcatacggcagaacccaaatctgaatgtaggtctgtaaaattgtcaagtccacttgttcccaggacccaacaccaccttttctggaatg

SEQ ID NO: 68674 - DNA, 110 bp, synthetic construct
  source 1..110: mol_type = other DNA
aatacttaggctcagggtgttacctaaaaaaagaagtgtgtttccacatctgggtcaaagcttgatcacatggagaaaatagctgcaggagaaagaactcgggcccagca

SEQ ID NO: 68675 - DNA, 110 bp, synthetic construct
  source 1..110: mol_type = other DNA
ccattggtctggtacctccttggctcttacaggcatggaaggagaagtagcctgggaagtgacatcttgacagaggacagatcctgctttcagtggctgttttagggagc

SEQ ID NO: 68676 - DNA, 110 bp, synthetic construct
  source 1..110: mol_type = other DNA
gaagtgacatcttgacagaggacagatcctgctttcagtggctgttttagggagctgctcctttccatgctcctgggatcgattggtgaggcagttctcctccaaccccc

SEQ ID NO: 68677 - DNA, 110 bp, synthetic construct
  source 1..110: mol_type = other DNA
gcttctcacttttactgggtggaaaggccaggtcccacacattgactcagatgggaccagctcctgtgtgaatgtggcgattaaagagagcggtggtccatttcccaggt

SEQ ID NO: 68678 - DNA, 110 bp, synthetic construct
  source 1..110: mol_type = other DNA
ccttagcacatcaagtatgaataagcaatgctcaccagaggaaaaatccagctgccatactgactttgcttctcttccagccacatctgtaccacccagaccctcggccc

SEQ ID NO: 68679 - DNA, 110 bp, synthetic construct
  source 1..110: mol_type = other DNA
gtggactcgcaactcagagggaagcagtgggccgtttgcagtaccccacttccttctctacaattacttgtctaagcatgtgggccaagaggcatcaaccaaagctcctc

SEQ ID NO: 68680 - DNA, 110 bp, synthetic construct
  source 1..110: mol_type = other DNA
ctctacaattacttgtctaagcatgtgggccaagaggcatcaaccaaagctcctccatggaatctaaaatgtaatgtcaggaaagaaaagttccctcttgaagctcttgg

SEQ ID NO: 68681 - DNA, 110 bp, synthetic construct
  source 1..110: mol_type = other DNA
ccagtcgagttcataacctgctgagacacaacaggaaccccctaaaatctatttaatattgagccaacctacccaatgtatacgggatgtttcagtttgtttaaatcagt

SEQ ID NO: 68682 - DNA, 110 bp, synthetic construct
  source 1..110: mol_type = other DNA
atattgagccaacctacccaatgtatacgggatgtttcagtttgtttaaatcagttacatttttgtgtctttcaggggtgtttcaacgttttcctcttagtggtttatac

SEQ ID NO: 68683 - DNA, 110 bp, synthetic construct
  source 1..110: mol_type = other DNA
tctacccttgatttttctttgctaaggatatttttaaaaagcacaaagagatcaagagtaatatagcaatcacctgggtaccaagcctccagaattgattgttaacattc

SEQ ID NO: 68684 - DNA, 110 bp, synthetic construct
  source 1..110: mol_type = other DNA
tgccaactccagaggactcttctctgtgtccctctgtgccccagggcacagtgaccacccttctccacacaccctgctacccaagctctcaagacgatgcatcctcctgg

SEQ ID NO: 68685 - DNA, 110 bp, synthetic construct
  source 1..110: mol_type = other DNA
cacccttctccacacaccctgctacccaagctctcaagacgatgcatcctcctggcgtccagtctactcatgggcctctcctgtgacgtcttctttgcagattcccacct

SEQ ID NO: 68686 - DNA, 110 bp, synthetic construct
  source 1..110: mol_type = other DNA
gcgattgagctactgtatctaaactcactgaaaaattgctataatgtgatccaagatgtgcttatgtcaacttatcttcttttagcatttttaatttgatttcatggaat

SEQ ID NO: 68687 - DNA, 110 bp, synthetic construct
  source 1..110: mol_type = other DNA
ttgtgtgactccacagaagagaacagcaactatccctgaaatttaaaaacatatcagtcaaaatcaatattgtttttcccatctaagtcaaagggtagggatatcccagc

SEQ ID NO: 68688 - DNA, 110 bp, synthetic construct
  source 1..110: mol_type = other DNA
gacatcctaagagagaggaagaggggagagaaactctcttcttcctcagggcctggttaggacatcagaaactgccatacccatctcactcccatcctgatactgaagtc

SEQ ID NO: 68689 - DNA, 110 bp, synthetic construct
  source 1..110: mol_type = other DNA
tcagatagttgtatggtccaaacgcaggatatgaattaatgaaccaatgtgaactaatgcttttataatagggactttctttcacagtggtttaggtcactctctgtacc

SEQ ID NO: 68690 - DNA, 110 bp, synthetic construct
  source 1..110: mol_type = other DNA
aatgcttttataatagggactttctttcacagtggtttaggtcactctctgtacctgataagtattttaaccttatttacataaacttctctttctattttcaggtcctt

SEQ ID NO: 68691 - DNA, 110 bp, synthetic construct
  source 1..110: mol_type = other DNA
taggaatttcttgtagttctgccttcagaatgtatccagaatccaaccacttgctctctcctgggctaccacacctgtgtgaaccaccatcacctctcacctggatcatt

SEQ ID NO: 68692 - DNA, 110 bp, synthetic construct
  source 1..110: mol_type = other DNA
ctctcctgggctaccacacctgtgtgaaccaccatcacctctcacctggatcattgccagagcctcagtgtctctctgcttccaaactgccccctacagttttacgccac

SEQ ID NO: 68693 - DNA, 110 bp, synthetic construct
  source 1..110: mol_type = other DNA
cgagatgtatcctggataaaatgtagacagaagttataacttgcaaagctttctgttggttgctcctattcccctgccttacttcctaatgctttccttccacatacccc

SEQ ID NO: 68694 - DNA, 110 bp, synthetic construct
  source 1..110: mol_type = other DNA
ttggttgctcctattcccctgccttacttcctaatgctttccttccacataccccacatttcaacagcgtcacagacactacactacccaagtggcatccatgtctgggt

SEQ ID NO: 68695 - DNA, 110 bp, synthetic construct
  source 1..110: mol_type = other DNA
ccctacaagttcacctgccattttactatttcaggtaatcattgtgtttcaaacgcatttaaataacctggaatgtaatgaacagagaatacatgatttaagtgacaatc

SEQ ID NO: 68696 - DNA, 110 bp, synthetic construct
  source 1..110: mol_type = other DNA
ggcaaagagggggagtgggcaagacggacagtgattgattgtcaaatagcattgcctacttccatttcattaactttcaactgcattgaatagcatttaaagtgcagtta

SEQ ID NO: 68697 - DNA, 110 bp, synthetic construct
  source 1..110: mol_type = other DNA
ctacttccatttcattaactttcaactgcattgaatagcatttaaagtgcagttaactcctctcctatgatgtgttccaggtgactggaagctctgctacagaaagcctt

SEQ ID NO: 68698 - DNA, 110 bp, synthetic construct
  source 1..110: mol_type = other DNA
agcacacattaaatatatgtgcataagtaaattctacagatcaatcaccaaggttaccatttatgtccctaaacttaaagctagctaatgcgcttaaaatagccctagca

SEQ ID NO: 68699 - DNA, 110 bp, synthetic construct
  source 1..110: mol_type = other DNA
accatttatgtccctaaacttaaagctagctaatgcgcttaaaatagccctagcacgattcttctaaataatttagtcctgaggcttagaccatgattccctcagaccat

SEQ ID NO: 68700 - DNA, 110 bp, synthetic construct; identical to SEQ ID NO: 68698
  source 1..110: mol_type = other DNA

SEQ ID NO: 68701 - DNA, 110 bp, synthetic construct; identical to SEQ ID NO: 68699
  source 1..110: mol_type = other DNA

SEQ ID NO: 68702 - DNA, 110 bp, synthetic construct
  source 1..110: mol_type = other DNA
accacaacctcctcttcatggagtattaggaatctttactaatttgtgcccatgtcttatcaacttggatttcatttattatttatatgcatgtgtatgtgtgtgtcttt

SEQ ID NO: 68703 - DNA, 110 bp, synthetic construct
  source 1..110: mol_type = other DNA
gtgcccatgtcttatcaacttggatttcatttattatttatatgcatgtgtatgtgtgtgtctttaacaaccagtgatctcatttatcactcaactagaaaaaagaagat

SEQ ID NO: 68704 - DNA, 110 bp, synthetic construct
  source 1..110: mol_type = other DNA
tttggggacaagatataatattaattactggcatgtacttcctgttgcctttgtgataaccatatctggcagctgacaagcacctccaccagagcctggagaagctcttg

SEQ ID NO: 68705 - DNA, 110 bp, synthetic construct
  source 1..110: mol_type = other DNA
ataaccatatctggcagctgacaagcacctccaccagagcctggagaagctcttgtcattctgcaagctggaattcgactgaaattaccatagacatagtcagcacatcc

SEQ ID NO: 68706 - DNA, 110 bp, synthetic construct; identical to SEQ ID NO: 68704
  source 1..110: mol_type = other DNA

SEQ ID NO: 68707 - DNA, 110 bp, synthetic construct; identical to SEQ ID NO: 68705
  source 1..110: mol_type = other DNA

SEQ ID NO: 68708 - DNA, 110 bp, synthetic construct
  source 1..110: mol_type = other DNA
acttcattttctttagtccttcagctgtatccatcttttcacgtgttgatttgcccattagtttgccccttgaatgattttcggtgaatttatctcattgccttgttaca

SEQ ID NO: 68709 - DNA, 110 bp, synthetic construct; identical to SEQ ID NO: 68708
  source 1..110: mol_type = other DNA

SEQ ID NO: 68710 - DNA, 110 bp, synthetic construct
  source 1..110: mol_type = other DNA
ctcagcttctagtatgctcagttaaccagcccttgtatggtgtccctcctaagggttgtagaaatttaaaaccagtaaatgcttgatgacagtgctgttgttgtgaagtt

SEQ ID NO: 68711 - DNA, 110 bp, synthetic construct
  source 1..110: mol_type = other DNA
cctttcccaactaattgggaaaggatcagtggatgagggaccagcttctctggagaaccacacaaaggtcctgctttggtttcattcaacccagatcagcaaaactaaga

SEQ ID NO: 68712 - DNA, 110 bp, synthetic construct
  source 1..110: mol_type = other DNA
acgttgtatacagtcgcagctacacatacatgaatgtgaccctcaacagcaaaacaatggctctgagaactgaactcttggtagactatcttgaaggtctcagattctgg

SEQ ID NO: 68713 - DNA, 110 bp, synthetic construct
  source 1..110: mol_type = other DNA
aatggctctgagaactgaactcttggtagactatcttgaaggtctcagattctggatggcataaagatgggatttagcactgcaaactctttggaaaatgaaccaacctg

SEQ ID NO: 68714 - DNA, 110 bp, synthetic construct
  source 1..110: mol_type = other DNA
tgtactgttttcgagtctatcactgtacattttgaaaaggagaaaatcaacatctcagatttgtagcttacagcacccaatagctatccactaagagatattcaagtgga

SEQ ID NO: 68715 - DNA, 110 bp, synthetic construct
  source 1..110: mol_type = other DNA
cagatttgtagcttacagcacccaatagctatccactaagagatattcaagtggaaattatattaaaggcaacaggagtgcaaagaaaatatttgggtttataaccatgt

SEQ ID NO: 68716 - DNA, 110 bp, synthetic construct
  source 1..110: mol_type = other DNA
catattaatatagaaaactcacaaaaacaaaagctctttgagatcctcaataattttcaagaatgtaaagcgttgctgagaccaaaaagaataaaaactgctggtgtaag

SEQ ID NO: 68717 - DNA, 110 bp, synthetic construct
  source 1..110: mol_type = other DNA
catcaggttctgatcaggctaaacaaataataatgacattttagtcctttaaactcctgttttaagcaaacataaagcagatcgatctcagcttcagcaggggtttggcc

SEQ ID NO: 68718 - DNA, 110 bp, synthetic construct
  source 1..110: mol_type = other DNA
tcctccacatagtgattacaggatccaagagccatccatcaaatggctctgctatcccctagaacaaggatctaacttgtgggcctatttttagttgtcttgggagctaa

SEQ ID NO: 68719 - DNA, 110 bp, synthetic construct
  source 1..110: mol_type = other DNA
gctctgctatcccctagaacaaggatctaacttgtgggcctatttttagttgtcttgggagctaagctaacaatagatttactttttttaatttacatttttaaaggatt

SEQ ID NO: 68720 - DNA, 110 bp, synthetic construct
  source 1..110: mol_type = other DNA
ggttcatatgtgcattcagacaggaggagtggttgctgcatccacttggcacattgtgatggagttttagagaagctagctgggagcaccttgtaacgaagagatagtaa

SEQ ID NO: 68721 - DNA, 110 bp, synthetic construct
  source 1..110: mol_type = other DNA
atgaggaactggaggtaggagtgttgccctgagagtcagtgatccctatgtccaagtttgcccaagtccaaggtttctaacagggttgccaggacataattcagagggtt

SEQ ID NO: 68722 - DNA, 110 bp, synthetic construct
  source 1..110: mol_type = other DNA
gtttgcccaagtccaaggtttctaacagggttgccaggacataattcagagggttcatgaactacctggatgcaggaaaaaactccgtctttatttttactcatcccttt

SEQ ID NO: 68723 - DNA, 110 bp, synthetic construct
  source 1..110: mol_type = other DNA
tcctcttgatttggctgatttccttttatttttgaaattttgttttagacaccattactttgtaaagtctttccttttcctaagtagtcattctctcaccaggcaatttt

SEQ ID NO: 68724 - DNA, 110 bp, synthetic construct
  source 1..110: mol_type = other DNA
tactttgtaaagtctttccttttcctaagtagtcattctctcaccaggcaatttttgtgcctcatatatacttggatttttttttcacttaagacataggataattatct

SEQ ID NO: 68725 - DNA, 110 bp, synthetic construct
  source 1..110: mol_type = other DNA
atttgattcctagggcacctgtgcagagatgcacacttttcatcccaggtttttattactttcgcaggtagttcttagcttctgaacattagccatgggaatggttggcc

SEQ ID NO: 68726 - DNA, 110 bp, synthetic construct
  source 1..110: mol_type = other DNA
gtgcctcagtttcctcttctgtaaaacatcattcatcataagatagatttgaggatggcgtgacgtcttgtcacagtattatattgttcagtccttctagatcttttatt

SEQ ID NO: 68727 - DNA, 110 bp, synthetic construct
  source 1..110: mol_type = other DNA
tggcgtgacgtcttgtcacagtattatattgttcagtccttctagatcttttattggagcttgacatctcagcagaactcactatagaaatgctacctgagtggaggaag

SEQ ID NO: 68728 - DNA, 110 bp, synthetic construct; identical to SEQ ID NO: 68726
  source 1..110: mol_type = other DNA

SEQ ID NO: 68729 - DNA, 110 bp, synthetic construct; identical to SEQ ID NO: 68727
  source 1..110: mol_type = other DNA

SEQ ID NO: 68730 - DNA, 110 bp, synthetic construct
  source 1..110: mol_type = other DNA
ccgctgatcactgccctgatgagcctggtgagggaatttccgaagcacgcaggcgcttttcctctttccagctccctcctaggggtgcaggtcccaccacacttcttttc

SEQ ID NO: 68731 - DNA, 110 bp, synthetic construct
  source 1..110: mol_type = other DNA
acttcttgatgggagggagtcaaggaacccttagattctgcctaagaaactcaggaaacagaaactttctctcccaaagataatcatttaaactaagtcatattgctact

SEQ ID NO: 68732 - DNA, 110 bp, synthetic construct
  source 1..110: mol_type = other DNA
aaacagaaactttctctcccaaagataatcatttaaactaagtcatattgctactattatgtgacaagtctggggatgcctgcacaaggttatcagatgccttcaccttt

SEQ ID NO: 68733 - DNA, 110 bp, synthetic construct
  source 1..110: mol_type = other DNA
aactcctagaaaaattccttaaggagtaatagttcccttttgcttttttccccttcccctttcttgctgtctggtaatgaatgtgaaggctggtgcccaagaagctgttt

SEQ ID NO: 68734 - DNA, 110 bp, synthetic construct
  source 1..110: mol_type = other DNA
cccctttcttgctgtctggtaatgaatgtgaaggctggtgcccaagaagctgttttgaacagtgaatcaatttgaggatgtaagctatttactatgtgactgtagagaaa

SEQ ID NO: 68735 - DNA, 110 bp, synthetic construct
  source 1..110: mol_type = other DNA
ggtcacaacgggaactcctaatactatttttaaatagatacttttacaaggggcttctcagctaaacccaagcacaccattttatgagatggtagaaagttacttcacga

SEQ ID NO: 68736 - DNA, 110 bp, synthetic construct
  source 1..110: mol_type = other DNA
attccctgtggaaaggaagtacagtgaaccttcgaatttctggcagttctttatcagtgtaagtcaatgcgatagaatcttgacttctaatttgaaggctacagctgttt

SEQ ID NO: 68737 - DNA, 110 bp, synthetic construct
  source 1..110: mol_type = other DNA
agtgtaagtcaatgcgatagaatcttgacttctaatttgaaggctacagctgtttaaaaaggtaagaaactttaggggcatttcaactcctttcttttgcagatctggaa

SEQ ID NO: 68738 - DNA, 110 bp, synthetic construct
  source 1..110: mol_type = other DNA
gcatataaagaagaaatatatataaaaaatctcatagctccaaactacaagagacagtatgatgaatgtcctaggtcttaaagtatttgatgtacaatgagctgccttta

SEQ ID NO: 68739 - DNA, 110 bp, synthetic construct
  source 1..110: mol_type = other DNA
agtatgatgaatgtcctaggtcttaaagtatttgatgtacaatgagctgcctttatactttaacaaacatggcatccttggagcataagtggctataatcctggttgcaa

SEQ ID NO: 68740 - DNA, 110 bp, synthetic construct
  source 1..110: mol_type = other DNA
aggcaaagtgctgttctaggaactttacttacattaattatttaatccttcaataacactgcagctagtatactattaatagctatttttaagcaaggaaaataaggtac

SEQ ID NO: 68741 - DNA, 110 bp, synthetic construct
  source 1..110: mol_type = other DNA
agttcacctgagtccccattttcatctaacccggccgcttccacacttacttgatctcaggcattcgcagctgtcatcgtggattgacacccatgggtgactgtgctcca

SEQ ID NO: 68742 - DNA, 110 bp, synthetic construct
  source 1..110: mol_type = other DNA
accaaagcacacttggaagtttttgctattaaatcactcatgttgtttttagtattattctgctccaacatgaatatcttttcactttggactttttaatgctagaattg

SEQ ID NO: 68743 - DNA, 110 bp, synthetic construct; identical to SEQ ID NO: 68742
  source 1..110: mol_type = other DNA

SEQ ID NO: 68744 - DNA, 110 bp, synthetic construct
  source 1..110: mol_type = other DNA
aggttttgaccagtgcacagcaagctgtaccaggatttagtttcccatatactgtttcatatgtttcctcttgtaattgagacattatttaggtaaatagtacagattat

SEQ ID NO: 68745 - DNA, 110 bp, synthetic construct
  source 1..110: mol_type = other DNA
cttgcatctgcaaccttttctttcccctacaaacagataaaggcagcttaaattgctctgatggtatataacagagaatggcattctaataaaaaatgtatctaaacaaa

SEQ ID NO: 68746 - DNA, 110 bp, synthetic construct
  source 1..110: mol_type = other DNA
cttcatagtgccacagtttagctagtatgaaatctgattattctgaaatagcatattcctgagttatcaaaactattttgtgaaacattcaaaagactctatgattaaga

SEQ ID NO: 68747 - DNA, 110 bp, synthetic construct
  source 1..110: mol_type = other DNA
tgcatacttagttgtataagaaactgccaaaatgtttttcagagtggctgtgccattttatgttcccagcatcaatgtatgaatgatccagtttttccatattttcacca

SEQ ID NO: 68748 - DNA, 110 bp, synthetic construct
  source 1..110: mol_type = other DNA
ttttatgttcccagcatcaatgtatgaatgatccagtttttccatattttcaccagaatttagaattatccagtattttttattagcctttctgataggtatgtagtagc

SEQ ID NO: 68749 - DNA, 110 bp, synthetic construct
  source 1..110: mol_type = other DNA
tacttcacactagtggtgttctttaaaaatgagcaaaagatttagaaaactcagtagccctagcactttcagccaggaagttcttatcagctgaaattaagtgccctcca

SEQ ID NO: 68750 - DNA, 110 bp, synthetic construct
  source 1..110: mol_type = other DNA
agccctagcactttcagccaggaagttcttatcagctgaaattaagtgccctccagtgatctggattacagcagcaagcacacaatgcttgctgccttgccccgcctcca

SEQ ID NO: 68751 - DNA, 110 bp, synthetic construct
  source 1..110: mol_type = other DNA
aatttctctgctctcccctccccaacctcaaccactccctagctttataccagaaagattcctttcagtctttaagactcctctaggagtcctcaaaaacatccaaccag

SEQ ID NO: 68752 - DNA, 110 bp, synthetic construct
  source 1..110: mol_type = other DNA
ccacattgtgtaaatttaaagtgtactatatgctgatttgatacacatactgtattacaattgccattatagtgatagttggcacctccattgtgtcacataattgccat

SEQ ID NO: 68753 - DNA, 110 bp, synthetic construct; identical to SEQ ID NO: 68752
  source 1..110: mol_type = other DNA

SEQ ID NO: 68754 - DNA, 110 bp, synthetic construct
  source 1..110: mol_type = other DNA
aaatggcaaaaatgggatttgactgtttggcccagaggtaaagcttttaactattgctgtaaatttgcaagaaaagacttgactaaacagactggttttcccttcttctg

SEQ ID NO: 68755 - DNA, 110 bp, synthetic construct
  source 1..110: mol_type = other DNA
acataaatttatttttattgttctgcaggtcagaagtccaaaatgaagttgcttcagggctgtgtacctgctgaggctctgggggagaacccattcctttgcctattcca

SEQ ID NO: 68756 - DNA, 110 bp, synthetic construct
  source 1..110: mol_type = other DNA
agggctgtgtacctgctgaggctctgggggagaacccattcctttgcctattccagcttctagagggcttgtggccccttcctcccttttctaagccagcaatagccagt

SEQ ID NO: 68757 - DNA, 110 bp, synthetic construct; identical to SEQ ID NO: 68755
  source 1..110: mol_type = other DNA

SEQ ID NO: 68758 - DNA, 110 bp, synthetic construct; identical to SEQ ID NO: 68756
  source 1..110: mol_type = other DNA

SEQ ID NO: 68759 - DNA, 110 bp, synthetic construct
  source 1..110: mol_type = other DNA
cctctggccttggcccggctcgaatgggttctcctacacccaacagccagggaatcagctgttgctgacatcaggtagtttgtaggcaataatttttccagtgccctgct

SEQ ID NO: 68760 - DNA, 110 bp, synthetic construct
  source 1..110: mol_type = other DNA
cagctgttgctgacatcaggtagtttgtaggcaataatttttccagtgccctgctctgcccttagaacttccactgtgccaaaaaagagttctaagtgcaaagcagaaaa

SEQ ID NO: 68761 - DNA, 110 bp, synthetic construct; identical to SEQ ID NO: 68759
  source 1..110: mol_type = other DNA

SEQ ID NO: 68762 - DNA, 110 bp, synthetic construct; identical to SEQ ID NO: 68760
  source 1..110: mol_type = other DNA

SEQ ID NO: 68763 - DNA, 110 bp, synthetic construct
  source 1..110: mol_type = other DNA
tcacttatggccctcctagcctttggctcagcttcccccgcacctcctgcagctagattgtctctcttcatccattgttcccaaagaagcttggcagaaacataacaaga

SEQ ID NO: 68764 - DNA, 110 bp, synthetic construct
  source 1..110: mol_type = other DNA
tatagtgtagtccctctaggtgtttctgagtggccaaccctgttttcctcccatgtagccagccccagctccctcgctgatccataaggccagaattttagttttcaacc

SEQ ID NO: 68765 - DNA, 110 bp, synthetic construct
  source 1..110: mol_type = other DNA
tagccagccccagctccctcgctgatccataaggccagaattttagttttcaacccctgctggcagccacatacggttgcctgtaccactgacttttatggaggattgat

SEQ ID NO: 68766 - DNA, 110 bp, synthetic construct; identical to SEQ ID NO: 68764
  source 1..110: mol_type = other DNA

SEQ ID NO: 68767 - DNA, 110 bp, synthetic construct; identical to SEQ ID NO: 68765
  source 1..110: mol_type = other DNA

SEQ ID NO: 68768 - DNA, 110 bp, synthetic construct
  source 1..110: mol_type = other DNA
ctcagccaatatcttgactgtagccttgtgagacttcaagcagagggcccagctatgccactgagacctgactcaaggaaactgtgagataacaaatacatgttgtttaa

SEQ ID NO: 68769 - DNA, 110 bp, synthetic construct
  source 1..110: mol_type = other DNA
attaggtttttgttttatatccaacagcactgtttcattaattttgctgaaatctccatttcctgccacccacccctaaccctggggacaaaggcaaaacagtgtgatag

SEQ ID NO: 68770 - DNA, 110 bp, synthetic construct
  source 1..110: mol_type = other DNA
ccatttcctgccacccacccctaaccctggggacaaaggcaaaacagtgtgatagtgtgtgtagagtctttttgttcagttgaccagtccctagactgagcagacaaaat

SEQ ID NO: 68771 - DNA, 110 bp, synthetic construct
  source 1..110: mol_type = other DNA
tggactcctaggggctatttggctttctcaacttgctttctacccattgactatttgggaccctaggatcgtttcaagttctaaatattcagatacattttacagctgct

SEQ ID NO: 68772 - DNA, 110 bp, synthetic construct
  source 1..110: mol_type = other DNA
tgggaccctaggatcgtttcaagttctaaatattcagatacattttacagctgctttggtgatatagttgcctttcactccattggacaatacgcacactcaaaggactt

SEQ ID NO: 68773 - DNA, 110 bp, synthetic construct; identical to SEQ ID NO: 68771
  source 1..110: mol_type = other DNA

SEQ ID NO: 68774 - DNA, 110 bp, synthetic construct; identical to SEQ ID NO: 68772
  source 1..110: mol_type = other DNA

SEQ ID NO: 68775 - DNA, 110 bp, synthetic construct
  source 1..110: mol_type = other DNA
agaaatgtctaatttaaagtctaaggtaggaactgtacaagatgaacctgggacatcttatcacaccttggcaaaagagatcatatcaaaagaatgcatgagccaacttg

SEQ ID NO: 68776 - DNA, 110 bp, synthetic construct
  source 1..110: mol_type = other DNA
tcttatcacaccttggcaaaagagatcatatcaaaagaatgcatgagccaacttgaagaggctctcactacccaaaggtagaatcaaattattaaaatgatcactatggt

SEQ ID NO: 68777 - DNA, 110 bp, synthetic construct
  source 1..110: mol_type = other DNA
ggggccagtgagcagctggcacttggtgtgttctttgagtacaggagagcattagaaagaaaggatacacttaagagaatgggctttctttttcaccaaacccaattttt

SEQ ID NO: 68778 - DNA, 110 bp, synthetic construct
  source 1..110: mol_type = other DNA
tgagtacaggagagcattagaaagaaaggatacacttaagagaatgggctttctttttcaccaaacccaatttttctttaataatgtctaaattatgaacttgctttcta

SEQ ID NO: 68779 - DNA, 110 bp, synthetic construct
  source 1..110: mol_type = other DNA
gaagtgaactccagaagtttttttttttcctgctaattgaccacaactctatattaaaccccttgctagcaccaacatgtctttcccagctctatgctcttaggaagata

SEQ ID NO: 68780 - DNA, 110 bp, synthetic construct; identical to SEQ ID NO: 68779
  source 1..110: mol_type = other DNA

SEQ ID NO: 68781 - DNA, 110 bp, synthetic construct
  source 1..110: mol_type = other DNA
acctcacaataactctgcaaagttaggaaactgaaatgcagagaaacaggaaaatgggaaagttgaaattaaaacctagctcctttttacctcaaaacccatatttgttc

SEQ ID NO: 68782 - DNA, 110 bp, synthetic construct
  source 1..110: mol_type = other DNA
tgactcctcttgcaaaaacatgtattagatctcctggcttcttttgtgcctcaaagtacattctctagagcttctctggaggttccctagaaagatgggaactgtggagt

SEQ ID NO: 68783 - DNA, 110 bp, synthetic construct
  source 1..110: mol_type = other DNA
gtacattctctagagcttctctggaggttccctagaaagatgggaactgtggagtacacaagctgagatctggtgactgaatgggcaccagtcaaaagggcaacagtgcc

SEQ ID NO: 68784 - DNA, 110 bp, synthetic construct; identical to SEQ ID NO: 68782
  source 1..110: mol_type = other DNA

SEQ ID NO: 68785 - DNA, 110 bp, synthetic construct; identical to SEQ ID NO: 68783
  source 1..110: mol_type = other DNA

SEQ ID NO: 68786 - DNA, 110 bp, synthetic construct
  source 1..110: mol_type = other DNA
gatccaagaggtgtttgtttatttgaaggtaatagcttcatgggtgtaaagatgtaagaatctcaatcagacaaggaaatgacaaaaataaaataattgagtgagacaac

SEQ ID NO: 68787 - DNA, 110 bp, synthetic construct
  source 1..110: mol_type = other DNA
aacctgcaccatagttgccatctgtgacacaagggaatgtccaaggaattgttaagttttaaaagatgtgacagtaatgttgtggttatattgggaaaagattttgattt

SEQ ID NO: 68788 - DNA, 110 bp, synthetic construct
  source 1..110: mol_type = other DNA
gttttaaaagatgtgacagtaatgttgtggttatattgggaaaagattttgattttttagagatatgtatttgcttcaaaacaatccaagggagagaagaaaagcaggcg

SEQ ID NO: 68789 - DNA, 110 bp, synthetic construct
  source 1..110: mol_type = other DNA
ccaagggcatgggaagatgctgccagtggtgatggaagaggcagcagtcagtatggcagaatcgcgccctccttctgacagcactcatgataatagtagcatgtgcagcc

SEQ ID NO: 68790 - DNA, 110 bp, synthetic construct
  source 1..110: mol_type = other DNA
gcagaatcgcgccctccttctgacagcactcatgataatagtagcatgtgcagccatcatgtaccgttgctcagttcttcccaaggtgaatgttagctcagtgggagtct

SEQ ID NO: 68791 - DNA, 110 bp, synthetic construct
  source 1..110: mol_type = other DNA
tctataaagtaatcaagatagcaatggtggtggcaaaggaatagacaaatagatcaatggaaaggaataaagagaccaggtatggacctgtgtaaatatagtccaccggt

SEQ ID NO: 68792 - DNA, 110 bp, synthetic construct; identical to SEQ ID NO: 68791
  source 1..110: mol_type = other DNA

SEQ ID NO: 68793 - DNA, 110 bp, synthetic construct
  source 1..110: mol_type = other DNA
ttcagtagtatacagcaatatttacaacagctaacagcatgactttcagaaacttgagcatataatagcaatttgttatttttctccaagttcattgacactgtcaaggc

SEQ ID NO: 68794 - DNA, 110 bp, synthetic construct; identical to SEQ ID NO: 68793
  source 1..110: mol_type = other DNA

SEQ ID NO: 68795 - DNA, 110 bp, synthetic construct
  source 1..110: mol_type = other DNA
accacactgcatttaatccttacctttttatgctgtggaatttggtgagccctttcctagtttaagcacctgaaaagttttgttttgatcctttttacttttgatgtgaa

SEQ ID NO: 68796 - DNA, 110 bp, synthetic construct
  source 1..110: mol_type = other DNA
ttttatgctgtggaatttggtgagccctttcctagtttaagcacctgaaaagttttgttttgatcctttttacttttgatgtgaaggatcatagaataattttaagacat

SEQ ID NO: 68797 - DNA, 110 bp, synthetic construct
  source 1..110: mol_type = other DNA
tgttgaactgctataaaattgatacagcatacaaaatcctataacctctttttcttccttaactctctagactcagcttttagattttccctcttcctctcactgccatc

SEQ ID NO: 68798 - DNA, 110 bp, synthetic construct; identical to SEQ ID NO: 68797
  source 1..110: mol_type = other DNA

SEQ ID NO: 68799 - DNA, 110 bp, synthetic construct
  source 1..110: mol_type = other DNA
atctacaattgaaggacttgaaggaaccacaaggagacaggaaagaggggcagaatcacaataaaatcaattatatttattacattggttcctctgctctgtgctgtccc

SEQ ID NO: 68800 - DNA, 110 bp, synthetic construct
  source 1..110: mol_type = other DNA
tcacaataaaatcaattatatttattacattggttcctctgctctgtgctgtccctccctcagcccttgccaacatacaacacggatttggaggtgcaggcggagaagca

SEQ ID NO: 68801 - DNA, 110 bp, synthetic construct
  source 1..110: mol_type = other DNA
agaaagttcaaatgacatgtaaacattgctatgtgtggggaagaggagtaagtaagctgcagggaaaggaatgcaataatttaaaaaataactacacaaataatagctgg

SEQ ID NO: 68802 - DNA, 110 bp, synthetic construct
  source 1..110: mol_type = other DNA
gtgctttgatgaattaaccagaagagaattctgtccaaaaaatgctggatcctgatgctgtgggataaatagagtaattgaaatgagaaacttaaaatatgaataaaaat

SEQ ID NO: 68803 - DNA, 110 bp, synthetic construct
  source 1..110: mol_type = other DNA
attttctagccaaagacagatagtaacttacatcaaattattcttgtttatccaaggagaacattgatcaaaaccatatgatttgaaaccagctacccctttttccctaa

SEQ ID NO: 68804 - DNA, 110 bp, synthetic construct
  source 1..110: mol_type = other DNA
ggagaacattgatcaaaaccatatgatttgaaaccagctacccctttttccctaatcacactgcatttgaacaagagcaaagatatctggcattttcaaatattggctca

SEQ ID NO: 68805 - DNA, 110 bp, synthetic construct
  source 1..110: mol_type = other DNA
tctctcttatttctgtttcttttagttacatcctcattcttctaatcacctcagtttgaagccagaaggtaatcttttagttactgttttctttcaggtcctatttattt

SEQ ID NO: 68806 - DNA, 110 bp, synthetic construct
  source 1..110: mol_type = other DNA
ttgaagccagaaggtaatcttttagttactgttttctttcaggtcctatttatttctagcttctgaaatctacatctcaggttttttttttccttcttcactcttatgat

SEQ ID NO: 68807 - DNA, 110 bp, synthetic construct; identical to SEQ ID NO: 68805
  source 1..110: mol_type = other DNA

SEQ ID NO: 68808 - DNA, 110 bp, synthetic construct; identical to SEQ ID NO: 68806
  source 1..110: mol_type = other DNA

SEQ ID NO: 68809 - DNA, 110 bp, synthetic construct
  source 1..110: mol_type = other DNA
cattctgcttttcccatatggaaataaacattttcaagaaaacaccttccgtcacaatacaatcaccattttccacctgtacgtcattccatctagttaaatataattga

SEQ ID NO: 68810 - DNA, 110 bp, synthetic construct
  source 1..110: mol_type = other DNA
cttccgtcacaatacaatcaccattttccacctgtacgtcattccatctagttaaatataattgacttaacctttcctcagtaacggacatttggactacattaatattt

SEQ ID NO: 68811 - DNA, 110 bp, synthetic construct
  source 1..110: mol_type = other DNA
aaactaaaacatgaatagttaagccactaaagctgagttccctatagtagttagcctacaatgacttttccaagcatgtgaccgatttattctaagaacgctgcgtagtt

SEQ ID NO: 68812 - DNA, 110 bp, synthetic construct
  source 1..110: mol_type = other DNA
ctacaatgacttttccaagcatgtgaccgatttattctaagaacgctgcgtagtttttcacttttacccatttttcttttccttgacattttatcaaaataatacactat

SEQ ID NO: 68813 - DNA, 110 bp, synthetic construct
  source 1..110: mol_type = other DNA
gttctcaggagacatccagatggagatgcacggtaggatgtctgtagctggggggtgagttctgggctggagagatggctggggagtcagcagggaatgaccttcaggta

SEQ ID NO: 68814 - DNA, 110 bp, synthetic construct
  source 1..110: mol_type = other DNA
tattcctcataactagcctattttttgtcagctcttttgagctgtattgaaggaggaatcaacaatatcaaaccttccgtacaatgcgggctaaaagtgtccatagatgt

SEQ ID NO: 68815 - DNA, 110 bp, synthetic construct
  source 1..110: mol_type = other DNA
ccctgaagtgggaaagagtgaagtgcattggaagcacctgaggagggtcagccggtggagtgaaagtcagtcagggagatattagtgcaacatgagatcagccagtgcag

SEQ ID NO: 68816 - DNA, 110 bp, synthetic construct
  source 1..110: mol_type = other DNA
tttttgcctctcattttaagcagaggccattaagaaatccttgaagagctaagatacagaattaccccttaggattttaactactaagttatgtatggggatgttttaga

SEQ ID NO: 68817 - DNA, 110 bp, synthetic construct
  source 1..110: mol_type = other DNA
agacctctgcttactttagcttcacagcaatagcagccagatgacaaaccaagcaaataaccactctatgagaaggaattccttaaaactgacactgacgagccagggaa

SEQ ID NO: 68818 - DNA, 110 bp, synthetic construct
  source 1..110: mol_type = other DNA
ccccttatttttctcaaataatcaggttctgcttctaatatctaaaatccagtgaatgggaagctttgcccttcgctttcacgcagttttagttcaccgtcctcaatcca

SEQ ID NO: 68819 - DNA, 110 bp, synthetic construct
  source 1..110: mol_type = other DNA
atgggaagctttgcccttcgctttcacgcagttttagttcaccgtcctcaatccactaaatgatgttgtttactggtttggtgtggtttttggtttttcttctctctgct

SEQ ID NO: 68820 - DNA, 110 bp, synthetic construct
  source 1..110: mol_type = other DNA
aaggggggaggggacatttggagccatgtgattgacatgacaaatcatacatgatttatacttaaactcacaaatattttccactagactaaattgttatttatatatcc

SEQ ID NO: 68821 - DNA, 110 bp, synthetic construct
  source 1..110: mol_type = other DNA
agagcctccctggctaaggctgaggaccctcttgtctgctctctcggtagcctatgcttctccaattatacacatgtgcttttgtaaatagtcaggcaaggtggctcccc

SEQ ID NO: 68822 - DNA, 110 bp, synthetic construct
  source 1..110: mol_type = other DNA
ctgcagccagagacccgagggaaagaagagctttccttccagagtattttcaggctcgccagaacagcaacagcccgcgcctccttaaagccggcgctgggacacctcct

SEQ ID NO: 68823 - DNA, 110 bp, synthetic construct
  source 1..110: mol_type = other DNA
tgggtaattcagtccataacaccaaaggacccacttgatacagcaaagatccatgctcaggtccttttactccagttccaaagtatctttatctgctttcatttaccaac

SEQ ID NO: 68824 - DNA, 110 bp, synthetic construct
  source 1..110: mol_type = other DNA
tccgacttactgttggctagagaaaaacatagagggccaagagagataatgacagtcagagagtgctggtcagtgcaggaactctgtggtgagtcatcctttggaatgac

SEQ ID NO: 68825 - DNA, 110 bp, synthetic construct
  source 1..110: mol_type = other DNA
gacgaggccctgcttccagaaaagaaaagaagcagacttggcctcaaggggacaggattgcccctgctgctttgaaaaccccaggtaccttttacaagtgtacgcacaca

SEQ ID NO: 68826 - DNA, 110 bp, synthetic construct
  source 1..110: mol_type = other DNA
cagaccccaaaacaggagagcttccataccagtaattcctcttcacatgttcacttattattgcaaatcacaaatatttatggagcatttaccacctattcattgtgata

SEQ ID NO: 68827 - DNA, 110 bp, synthetic construct
  source 1..110: mol_type = other DNA
agggatccccctcagctgagaggaggcggagttcctgctggcgaggcgcagctgtgctactcccggcattcacttggatcccagtgcgggtgcagcgtctctgcacacgg

SEQ ID NO: 68828 - DNA, 110 bp, synthetic construct
  source 1..110: mol_type = other DNA
gctactcccggcattcacttggatcccagtgcgggtgcagcgtctctgcacacggcttgctgctgccatcttggattagggcaccgtgggcagtgcttctgcacacggcc

SEQ ID NO: 68829 - DNA, 110 bp, synthetic construct
  source 1..110: mol_type = other DNA
tgtttacttctgcatttatgaaagcaaagaggctgctgtcgacctgcagaacctttcacatccagtttctgagagcatgagagcagcctgctgagaaggagatttgcaaa

SEQ ID NO: 68830 - DNA, 110 bp, synthetic construct
  source 1..110: mol_type = other DNA
tcacgtgataatcacaatgaagaggcaggcatcaatattgtacagtagactgtacaggctaagcatgattactcagaaatcacacatgagggattgatttgtgtccatat

SEQ ID NO: 68831 - DNA, 110 bp, synthetic construct
  source 1..110: mol_type = other DNA
aggctaagcatgattactcagaaatcacacatgagggattgatttgtgtccatattttcttatatgtgtttgtgagtttgtaagtgtggagaaaaaaaaaaggaaatctt

SEQ ID NO: 68832 - DNA, 110 bp, synthetic construct
  source 1..110: mol_type = other DNA
aggctcagaaacctatgggagagttgcattaggaatataagtagtcctttctcctcttcttcctaacactgcaccttcctagctgcttgccactttgctgtgctagtgct

SEQ ID NO: 68833 - DNA, 110 bp, synthetic construct
  source 1..110: mol_type = other DNA
cttcttcctaacactgcaccttcctagctgcttgccactttgctgtgctagtgctggttctttcccagctagggaaagagaggaggaatacgagagggcatgaactcaga

SEQ ID NO: 68834 - DNA, 110 bp, synthetic construct
  source 1..110: mol_type = other DNA
atatgagaaaccaaactcactattcttacacttgtcattttcttctttaaatcaagcagacttttttgcttctaatttacacccacactcttctccatctattcttttac

SEQ ID NO: 68835 - DNA, 110 bp, synthetic construct; identical to SEQ ID NO: 68834
  source 1..110: mol_type = other DNA

SEQ ID NO: 68836 - DNA, 110 bp, synthetic construct
  source 1..110: mol_type = other DNA
attcagaccacacagtttgactgtaaagcccacaaactctaactaattgcttttctgaaagaaaaaggagaaagctgatttttagataggaagaaatgtgtatttttatt

SEQ ID NO: 68837 - DNA, 110 bp, synthetic construct
  source 1..110: mol_type = other DNA
catcatgcattctcattcctctgtttacaagttttcccctgctctcctctcacacccctgatctgccctagtttaaatccccctttcttgccagaagtacttcagagttc

SEQ ID NO: 68838 - DNA, 110 bp, synthetic construct
  source 1..110: mol_type = other DNA
ccctgatctgccctagtttaaatccccctttcttgccagaagtacttcagagttcacttttggggggaatcatttcccatattctctgctagaatctgtcactcctgagt

SEQ ID NO: 68839 - DNA, 110 bp, synthetic construct; identical to SEQ ID NO: 68837
  source 1..110: mol_type = other DNA

SEQ ID NO: 68840 - DNA, 110 bp, synthetic construct; identical to SEQ ID NO: 68838
  source 1..110: mol_type = other DNA

SEQ ID NO: 68841 - DNA, 110 bp, synthetic construct
  source 1..110: mol_type = other DNA
gcgtgggagaaaggatgatgtatattttggaaaacagaagacaaatttgagagacattttcaagcttgaatgactgggtatatgatttactggatatggggaacgaagca

SEQ ID NO: 68842 - DNA, 110 bp, synthetic construct
  source 1..110: mol_type = other DNA
attttcaagcttgaatgactgggtatatgatttactggatatggggaacgaagcacaatgaatactaaaggatgtgaatagttctattgtgaacaaagttactattattg

SEQ ID NO: 68843 - DNA, 110 bp, synthetic construct
  source 1..110: mol_type = other DNA
agctggctatattgttctatataaagtggatttcttgtagacagcatatagttcaaatcttccaagttactcttttctgtttcctcactaaattttttgttctctgttct

SEQ ID NO: 68844 - DNA, 110 bp, synthetic construct; identical to SEQ ID NO: 68843
  source 1..110: mol_type = other DNA

SEQ ID NO: 68845 - DNA, 110 bp, synthetic construct
  source 1..110: mol_type = other DNA
ttcccctttatcactttcaaaatgattagttaatgaaggtatcagcagaccatagcagagacataagggcaaaagttttggaaagaggaccctgcctggtccctcaggtc

SEQ ID NO: 68846 - DNA, 110 bp, synthetic construct
  source 1..110: mol_type = other DNA
cagagacataagggcaaaagttttggaaagaggaccctgcctggtccctcaggtcatttcacaaacatccacctactttgtatccttaacaacccctctctccagttgtc

SEQ ID NO: 68847 - DNA, 110 bp, synthetic construct
  source 1..110: mol_type = other DNA
gaattaaaatagaacaagacagcaaatgaaacaaatttaccatcattcttctacaagagttgacaaactatgtcttatgggccaaaagcaacctgtttttgtataatcca

SEQ ID NO: 68848 - DNA, 110 bp, synthetic construct
  source 1..110: mol_type = other DNA
gtatacaagtttaccacttacaaaactgaccaaaaattcccgctccaaagtaatcaatgtataagcatgatgccaactactccatctgataaatcagtaggacatgagaa

SEQ ID NO: 68849 - DNA, 110 bp, synthetic construct
  source 1..110: mol_type = other DNA
tcctctgggcattaaccttcaacttccagccctgatctggatcccctgcctgagtctgctttagcctgagaggtctctagattcctactaacccttcctttacctacctc

SEQ ID NO: 68850 - DNA, 110 bp, synthetic construct
  source 1..110: mol_type = other DNA
ctgctttagcctgagaggtctctagattcctactaacccttcctttacctacctcctgtcacttcaggtctgcacctccacaaaccctttcatttgcacatgtgcacgtg

SEQ ID NO: 68851 - DNA, 110 bp, synthetic construct
  source 1..110: mol_type = other DNA
ccgtactccttttgctagctgagtaaagtatgctgcttctgagctcccctgcttgattattggcagggatcacaaagcttgtgctgttctcaagatcacgccacagaccc

SEQ ID NO: 68852 - DNA, 110 bp, synthetic construct
  source 1..110: mol_type = other DNA
attattggcagggatcacaaagcttgtgctgttctcaagatcacgccacagacccactgggatgtttgtgactcctaggcactgggcactacttttaaattcactttgcc

SEQ ID NO: 68853 - DNA, 110 bp, synthetic construct
  source 1..110: mol_type = other DNA
tcttttatctttaagtataggcccttctactaggtcaaagaaggatttacaacttaaaatattttttcctttgcttgcctagtgccttttgcattgtgaaaacttacttt

SEQ ID NO: 68854 - DNA, 110 bp, synthetic construct
  source 1..110: mol_type = other DNA
ccattccctcttaatgacagctggactctcctgcagtttttaatcctttccttcaaaactcagctttggattcacttgtggcgggtggctgggtcagatgccttgctctc

SEQ ID NO: 68855 - DNA, 110 bp, synthetic construct
  source 1..110: mol_type = other DNA
aaactcagctttggattcacttgtggcgggtggctgggtcagatgccttgctctctgctctcctagcatcctgtgcaaactctgacattgcttttattacattgcactga

SEQ ID NO: 68856 - DNA, 110 bp, synthetic construct
  source 1..110: mol_type = other DNA
aataagaaacacattccagagagtggggttgagcagaaaggaaaagatacataatgcaaaatctggatgagagagaaataaaagcacaaccacagaaatgaaaaggtcag

SEQ ID NO: 68857 - DNA, 110 bp, synthetic construct
  source 1..110: mol_type = other DNA
aggctaagacaatagaaatgagatggagggtgggaataaatatctacataacttgagcaaacttcctgctgccctaggttcataccttgactggcatttattagttgagt

SEQ ID NO: 68858 - DNA, 110 bp, synthetic construct; identical to SEQ ID NO: 68857
  source 1..110: mol_type = other DNA

SEQ ID NO: 68859 - DNA, 110 bp, synthetic construct
  source 1..110: mol_type = other DNA
aaaagttcttctctgaaaacctttgattttgtggttcctatcgtggctcagtggcaacaaatctgacttgtatcagtgaatatgcaggttttatccgtggcctcactcag

SEQ ID NO: 68860 - DNA, 110 bp, synthetic construct; identical to SEQ ID NO: 68859
  source 1..110: mol_type = other DNA

SEQ ID NO: 68861 - DNA, 110 bp, synthetic construct; identical to SEQ ID NO: 68859
  source 1..110: mol_type = other DNA

SEQ ID NO: 68862 - DNA, 110 bp, synthetic construct; identical to SEQ ID NO: 68859
  source 1..110: mol_type = other DNA

SEQ ID NO: 68863 - DNA, 110 bp, synthetic construct
  source 1..110: mol_type = other DNA
gtgctcaggaatcaatttaagaacaataggctgttgagttaaagcatattatcattaagaggtatttttacaatgcttagcattttttagtggatgcaatgattagatct

SEQ ID NO: 68864 - DNA, 110 bp, synthetic construct
  source 1..110: mol_type = other DNA
taagaggtatttttacaatgcttagcattttttagtggatgcaatgattagatctagagtcttagcccactcctacgtgacttattaggtgaccttgggccagtcatcct

SEQ ID NO: 68865 - DNA, 110 bp, synthetic construct
  source 1..110: mol_type = other DNA
agaaatagtatactaatagaaaaatgctaattgtgttaagagatttttttcagttgaagaaacctagaatcaatcagctggtaaaggctagagctgggactggaacccac

SEQ ID NO: 68866 - DNA, 110 bp, synthetic construct
  source 1..110: mol_type = other DNA
tgaagtaaaaaggattttctaataaccgtagcatttaaccaagaaaccccaattctatgtgttccagttaaatttgtttccactttccaagcacaaatgcttcagcatca

SEQ ID NO: 68867 - DNA, 110 bp, synthetic construct; identical to SEQ ID NO: 68866
  source 1..110: mol_type = other DNA

SEQ ID NO: 68868 - DNA, 110 bp, synthetic construct
  source 1..110: mol_type = other DNA
agggggcctttgacaatcctgtccaactaagcaattagaaagagtttatgtgaggctggtgtggggagcagacagggaaggatttgggtagcttcagatgctttgtatct

SEQ ID NO: 68869 - DNA, 110 bp, synthetic construct
  source 1..110: mol_type = other DNA
ctggtgtggggagcagacagggaaggatttgggtagcttcagatgctttgtatctgttttccaacaaaagacagcagcgaacacctactcacagtgacaattagggacaa

SEQ ID NO: 68870 - DNA, 110 bp, synthetic construct
  source 1..110: mol_type = other DNA
ccccccttattcttcttactttggattgattttctcttctttttctggttacttacgatagaagccaataaaggacatctaccaaaaaaaccttttgtttagtatttcct

SEQ ID NO: 68871 - DNA, 110 bp, synthetic construct
  source 1..110: mol_type = other DNA
cgatagaagccaataaaggacatctaccaaaaaaaccttttgtttagtatttccttgtgtggcgcagtgggttaatgatctggtttatctctgtggtatttgttgcatgt

SEQ ID NO: 68872 - DNA, 110 bp, synthetic construct
  source 1..110: mol_type = other DNA
cttgagctcctactgtgtgccaactctgtggtaggtattttattattaacaatgctgcaaggtggttatcattcagtctgttccaccaatgaggagatctcagcgctcct

SEQ ID NO: 68873 - DNA, 110 bp, synthetic construct
  source 1..110: mol_type = other DNA
gcttcggagtgctgggaggatttgagcggtgaggatttgagcagcggaagcgcttaggtaagagaaaagacaaattaattcttgaattctccctctcacatggcacgaat

SEQ ID NO: 68874 - DNA, 110 bp, synthetic construct
  source 1..110: mol_type = other DNA
aggtaagagaaaagacaaattaattcttgaattctccctctcacatggcacgaatgctgtagattcttacataatgaaatacaatgtctagtactatggagcaccaacat

SEQ ID NO: 68875 - DNA, 110 bp, synthetic construct
  source 1..110: mol_type = other DNA
gctacaccccacctgaccctgagagcctgaggagtgaaggggattcaattgaggatgtgctgacccagatcgacagtgagccaggtaagtgtcaggggagactcagagca

SEQ ID NO: 68876 - DNA, 110 bp, synthetic construct
  source 1..110: mol_type = other DNA
tgtgctgacccagatcgacagtgagccaggtaagtgtcaggggagactcagagcatcaccacagcagagaggtttttccatgttacacgcactcatctctcagcctccac

SEQ ID NO: 68877 - DNA, 110 bp, synthetic construct
  source 1..110: mol_type = other DNA
gcttctgaaagtgaattaagccctatacaaaattatttgagtgactattttcttggttctctccaggataatacatagctagtatcattccagatgcccaaaggaaacat

SEQ ID NO: 68878 - DNA, 110 bp, synthetic construct
  source 1..110: mol_type = other DNA
ccctttctctgtcttctggccctatttttctgatcttagtcactccacacattcttatggcgcctttaccaagagccaggcactgtgcaggtgcagaaaatgttaagatg

SEQ ID NO: 68879 - DNA, 110 bp, synthetic construct
  source 1..110: mol_type = other DNA
tatggcgcctttaccaagagccaggcactgtgcaggtgcagaaaatgttaagatgagctaagagctttcagcctggctggggggtgctggggcacccttggagcacatgc

SEQ ID NO: 68880 - DNA, 110 bp, synthetic construct; identical to SEQ ID NO: 68878
  source 1..110: mol_type = other DNA

SEQ ID NO: 68881 - DNA, 110 bp, synthetic construct; identical to SEQ ID NO: 68879
  source 1..110: mol_type = other DNA

SEQ ID NO: 68882 - DNA, 110 bp, synthetic construct
  source 1..110: mol_type = other DNA
cacggttgcccctgaagggtttgatagtagctgtgagctgtggaagaaggcagcactcttggcctgggactcctgccctcctgccccagctgtgccccagccaggtgtgg

SEQ ID NO: 68883 - DNA, 110 bp, synthetic construct
  source 1..110: mol_type = other DNA
ctgtggtgtaggtcccagatgcagctcagatctgacgtattgtggttgtggtgcaggccagcagctgtggcttcaatttgacctctagccttcgatcctataaagccttc

SEQ ID NO: 68884 - DNA, 110 bp, synthetic construct; identical to SEQ ID NO: 68883
  source 1..110: mol_type = other DNA

SEQ ID NO: 68885 - DNA, 110 bp, synthetic construct
  source 1..110: mol_type = other DNA
ctctcccatccatcccacacttggccgccagtgactttctaagacataaatatgaccagttacttctgcattttttgaatgatttactatcaccacatccaaattccatg

SEQ ID NO: 68886 - DNA, 110 bp, synthetic construct
  source 1..110: mol_type = other DNA
ccagttacttctgcattttttgaatgatttactatcaccacatccaaattccatgtcatgcccctgttactgctcctttccccatctttcaaaactttaaactttcttgc

SEQ ID NO: 68887 - DNA, 110 bp, synthetic construct
  source 1..110: mol_type = other DNA
ggggctcctgcttgattcccattggtgactggaacgcatgtgctgaggggcctgccatgcctgggaccccatgttcaaagagtgggtcatggtattcttgtttgaatccc

SEQ ID NO: 68888 - DNA, 110 bp, synthetic construct
  source 1..110: mol_type = other DNA
catgcctgggaccccatgttcaaagagtgggtcatggtattcttgtttgaatccctgagggggtgggggagctgcagggacaataggttctgacatttgccggtggtaat

SEQ ID NO: 68889 - DNA, 110 bp, synthetic construct
  source 1..110: mol_type = other DNA
cctttaaggatgcaatccacacattgcctggcttcatcattcagacacaccttgcacccaaccttctctgtaccctactcaggctacccctgcggcaaggagagctgctt

SEQ ID NO: 68890 - DNA, 110 bp, synthetic construct
  source 1..110: mol_type = other DNA
acccaaccttctctgtaccctactcaggctacccctgcggcaaggagagctgcttctgttctctcttgctctttctctagtgccacctcttaagcccaccccgttgaagt

SEQ ID NO: 68891 - DNA, 110 bp, synthetic construct; identical to SEQ ID NO: 68889
  source 1..110: mol_type = other DNA

SEQ ID NO: 68892 - DNA, 110 bp, synthetic construct; identical to SEQ ID NO: 68890
  source 1..110: mol_type = other DNA

SEQ ID NO: 68893 - DNA, 110 bp, synthetic construct
  source 1..110: mol_type = other DNA
gagcttgatgactgccattcccaaggtccaacccttctgtgtagcaggcattactgatcaagcctccccaataagcatctagagagggccgactgagcctgtaccttctg

SEQ ID NO: 68894 - DNA, 110 bp, synthetic construct
  source 1..110: mol_type = other DNA
gatcaagcctccccaataagcatctagagagggccgactgagcctgtaccttctgctgcactggtcatttgaaatcgggcattctgtgacttctgtccacataggtgata

SEQ ID NO: 68895 - DNA, 110 bp, synthetic construct
  source 1..110: mol_type = other DNA
agctcacagacctgaccgtgtatgtggggacgcatacgtagcacacactgtcagtagtctggaaacattcccttgttttctgtatttgcttagtgacttgcaactatcag

SEQ ID NO: 68896 - DNA, 110 bp, synthetic construct
  source 1..110: mol_type = other DNA
agtctggaaacattcccttgttttctgtatttgcttagtgacttgcaactatcagcatttgcatttctttgattaagagacttctttggccactgaagcctgctctgccc

SEQ ID NO: 68897 - DNA, 110 bp, synthetic construct
  source 1..110: mol_type = other DNA
tggagagccttggaaaccacgtttgtaccacatgatcttcctactgtggtcatgtcaataaggctgggatcaattctggacccgagctgggccaaggactaagaattaaa

SEQ ID NO: 68898 - DNA, 110 bp, synthetic construct
  source 1..110: mol_type = other DNA
atgacactctccccatcctaaatctcatatgatagtcattatcgtccccagcatgcttccagaaagtggctttattcttgctatttgaaagtcgattccagagacttccc

SEQ ID NO: 68899 - DNA, 110 bp, synthetic construct
  source 1..110: mol_type = other DNA
cttccagaaagtggctttattcttgctatttgaaagtcgattccagagacttcccaagcagcaaacagctcacgagcctgtcaggcacagcagctgggtctctccagtat

SEQ ID NO: 68900 - DNA, 110 bp, synthetic construct
  source 1..110: mol_type = other DNA
tgtaaactccttggaattagggagcctcatccagctgtttacacaaccgctcatgtggaaataattagaaattaagatgatgctctttgatgtgaacacccatcctaaat

SEQ ID NO: 68901 - DNA, 110 bp, synthetic construct
  source 1..110: mol_type = other DNA
ttagcttaccaagagattttcctccaaagattctctttcttctaccaaccacaacctcctgtttctttactcagtctagcctttgtttaggcctgcatcatggtattatc

SEQ ID NO: 68902 - DNA, 110 bp, synthetic construct
  source 1..110: mol_type = other DNA
gtaaggcaggcagcactcacttttcttcagataaggaggcaaaatatgatgatttatttttgagtatgtaatacaatgaatgtgctttaatgcatatgaggataatgaaa

SEQ ID NO: 68903 - DNA, 110 bp, synthetic construct
  source 1..110: mol_type = other DNA
caataaagaagatcttctttatatagccataaaattcaatattccttgggggactttccttaggagggaagaagacattttttatcctttcattttgacacattgaattg

SEQ ID NO: 68904 - DNA, 110 bp, synthetic construct
  source 1..110: mol_type = other DNA
ttccttaggagggaagaagacattttttatcctttcattttgacacattgaattgctactatgtatcgagtagcgtctagaggcagttaggcagagtgggagctagatct

SEQ ID NO: 68905 - DNA, 110 bp, synthetic construct
  source 1..110: mol_type = other DNA
acataattgcagttgcacagagatagtttcaacctatgggattcttccctttatggaagaaacagctgttatcaacattgagcagaaaaatggttcctttcattggatag

SEQ ID NO: 68906 - DNA, 110 bp, synthetic construct
  source 1..110: mol_type = other DNA
gaagaaacagctgttatcaacattgagcagaaaaatggttcctttcattggataggaaagtgggcagcaggccatgcagcaaggagggaataggtgtaaacgccattgac

SEQ ID NO: 68907 - DNA, 110 bp, synthetic construct
  source 1..110: mol_type = other DNA
gttgacctaagaacaagtatgctaagtggccattctttcccagcagctgtggaacagaaaaacctggctgcagctataggagctgtacaagcctggtttgaaagaggaat

SEQ ID NO: 68908 - DNA, 110 bp, synthetic construct
  source 1..110: mol_type = other DNA
gtatggcaggctattgtgtttcatcaggcagtactgcagtttagaatgatagtgccaccatctgtcaccagcatctgatgtcaccatattcttgcagacaaagacctggt

SEQ ID NO: 68909 - DNA, 110 bp, synthetic construct
  source 1..110: mol_type = other DNA
tactgatcatctattctctgaaagccctcggtttgacctaaagaaattttcaatcagggttgacatttacccacaataaccttacatttcagtaaacatgaagattaaag

SEQ ID NO: 68910 - DNA, 110 bp, synthetic construct
  source 1..110: mol_type = other DNA
agttttacttctctcttatcctttgtctgtgagtctcttgggtaatgattatgcaattaggcttctcttacatttaaatttcaatcaggttcaaccaaataaagcacagc

SEQ ID NO: 68911 - DNA, 110 bp, synthetic construct
  source 1..110: mol_type = other DNA
agctagctccctggtcgccagttcagacatcatcactagaaaggcgcttgtatgaccatttcggtgtttgaatgaattgggagactctagtgctgcatgtattgtgtcgc

SEQ ID NO: 68912 - DNA, 110 bp, synthetic construct
  source 1..110: mol_type = other DNA
ctaatcagaagtaaatacctagttagctctcttcctccaagacatataaatgagaggctcaatagaatagttatcacctttcttaaaacataacaggaaagaaaactgaa

SEQ ID NO: 68913 - DNA, 110 bp, synthetic construct
  source 1..110: mol_type = other DNA
ctctcaaatacccatatctctgctaaatataggtcactctttgatattagtgtccttgagggttagtcattgaatatgcatcgtctttaaaaaaaaaaaaatagctctct

SEQ ID NO: 68914 - DNA, 110 bp, synthetic construct
  source 1..110: mol_type = other DNA
attagtgtccttgagggttagtcattgaatatgcatcgtctttaaaaaaaaaaaaatagctctctttcttccttttgtctgttattttcttcttaaggagtatctaagct

SEQ ID NO: 68915 - DNA, 110 bp, synthetic construct; identical to SEQ ID NO: 68913
  source 1..110: mol_type = other DNA

SEQ ID NO: 68916 - DNA, 110 bp, synthetic construct; identical to SEQ ID NO: 68914
  source 1..110: mol_type = other DNA

SEQ ID NO: 68917 - DNA, 110 bp, synthetic construct
  source 1..110: mol_type = other DNA
accaacactcacctggacagtcctacagaccaggtctgccctggtgagtgttgacggtctctcacttttagttcccaatctataagagacttatttcaacaatcagtgtt

SEQ ID NO: 68918 - DNA, 110 bp, synthetic construct
  source 1..110: mol_type = other DNA
ggtctctcacttttagttcccaatctataagagacttatttcaacaatcagtgttcaatgtttactgataggacttacgctccaggccctccctaagttccaataaatat

SEQ ID NO: 68919 - DNA, 110 bp, synthetic construct
  source 1..110: mol_type = other DNA
tacagtatgcctagaatgtagtaaatactcaataaatattagcagctctttctcttgtgttttaaggaaagttctgggtgcaaaagggattttttttttccttttctttt

SEQ ID NO: 68920 - DNA, 110 bp, synthetic construct; identical to SEQ ID NO: 68919
  source 1..110: mol_type = other DNA

SEQ ID NO: 68921 - DNA, 110 bp, synthetic construct
  source 1..110: mol_type = other DNA
gatttggccccgtggtggaggagatagagtgaaaaaacttcttgaatcctttctcattgaaagattctttgattaatgggcttttcaaatgtcagaactgatcaccagca

SEQ ID NO: 68922 - DNA, 110 bp, synthetic construct
  source 1..110: mol_type = other DNA
attgaaagattctttgattaatgggcttttcaaatgtcagaactgatcaccagcatctgatccaactcttgcattttccagaccagggcactgagtcccaaggtggggaa

SEQ ID NO: 68923 - DNA, 110 bp, synthetic construct
  source 1..110: mol_type = other DNA
taagaggaaggagcgctcttccgtgggttattttacccatctcccaatagctcagcatcctctctgatattctcccaactccatgaatgactccagttgtgcttttcctc

SEQ ID NO: 68924 - DNA, 110 bp, synthetic construct
  source 1..110: mol_type = other DNA
catcctctctgatattctcccaactccatgaatgactccagttgtgcttttcctctctggctggggcatgaaaacccttgcgacaccgtgtgctgtccagctgccaggtc

SEQ ID NO: 68925 - DNA, 110 bp, synthetic construct; identical to SEQ ID NO: 68923
  source 1..110: mol_type = other DNA

SEQ ID NO: 68926 - DNA, 110 bp, synthetic construct; identical to SEQ ID NO: 68924
  source 1..110: mol_type = other DNA

SEQ ID NO: 68927 - DNA, 110 bp, synthetic construct
  source 1..110: mol_type = other DNA
gctcacaggaaaacggcggtgaccccagtgtttgcacagcacttgagcgtgtgtaaaatcctcacgtggatatttgctacagtccagagcagctgttatgctccccaggc

SEQ ID NO: 68928 - DNA, 110 bp, synthetic construct
  source 1..110: mol_type = other DNA
aaatcctcacgtggatatttgctacagtccagagcagctgttatgctccccaggcccaggggtagaaggggctgccccaggtcacaggctggtcaggtaaggaccaggga

SEQ ID NO: 68929 - DNA, 110 bp, synthetic construct; identical to SEQ ID NO: 68927
  source 1..110: mol_type = other DNA

SEQ ID NO: 68930 - DNA, 110 bp, synthetic construct; identical to SEQ ID NO: 68928
  source 1..110: mol_type = other DNA

SEQ ID NO: 68931 - DNA, 110 bp, synthetic construct
  source 1..110: mol_type = other DNA
ggattaaataagggggtgttggggggaaggcctagaaggtgcctgcacagagaagctattcagtgaaagccatttccttttttccttctcatgggaggtagtctttgagc

SEQ ID NO: 68932 - DNA, 110 bp, synthetic construct
  source 1..110: mol_type = other DNA
aacccagatcctcattttgttaccgctgagccacaacaggaaaactcccaaaaccatatattcagatgaactggattttctagttatcaagggcagaagtagctacattc

SEQ ID NO: 68933 - DNA, 110 bp, synthetic construct
  source 1..110: mol_type = other DNA
atatattcagatgaactggattttctagttatcaagggcagaagtagctacattctgtaaaccaaatcttcccgttaactgagttccagtgagatagaatctcacaccat

SEQ ID NO: 68934 - DNA, 110 bp, synthetic construct
  source 1..110: mol_type = other DNA
gtgggcagagccggcgggatgggctggcaggggcagtgcctgagatggtccttaccgggcccaccctctttctcacctggtcgagaggatacagggcagcttgagaggaa

SEQ ID NO: 68935 - DNA, 110 bp, synthetic construct
  source 1..110: mol_type = other DNA
cgggcccaccctctttctcacctggtcgagaggatacagggcagcttgagaggaagaaggtctcctgtgacaaccccacagaggggaggtagaggttgcccccaggaagc

SEQ ID NO: 68936 - DNA, 110 bp, synthetic construct
  source 1..110: mol_type = other DNA
cctcatggataccagtcagttttattaccacggagccacaaagggaactccctatacataaactttatcaggttaaagaagctcagtcctgagttcctgttgtggcgtgg

SEQ ID NO: 68937 - DNA, 110 bp, synthetic construct
  source 1..110: mol_type = other DNA
cttctgctgggagtgatgatgtttataagcacatcaaggaagcaggtgagtaagttgatgggcctgcttgctttatggaatctcaggggaaatgacagagattcagccac

SEQ ID NO: 68938 - DNA, 110 bp, synthetic construct
  source 1..110: mol_type = other DNA
agggaggcaacacccagagagggagagaaggaagggcgagttccaaagccttaagtaaaacaatagttacggagaaggggaagagctttcagggttagacttggcactgc

SEQ ID NO: 68939 - DNA, 110 bp, synthetic construct
  source 1..110: mol_type = other DNA
ttaaggtttcattgaagagttgcaccatgaatgatggacgggctctctccaaccttattttcttttgctctttgacatgatctttatggcctgtggtgatgttctccgca

SEQ ID NO: 68940 - DNA, 110 bp, synthetic construct
  source 1..110: mol_type = other DNA
tattttcttttgctctttgacatgatctttatggcctgtggtgatgttctccgcatgtaccattagaaatcacacctggatgtgttgatgctgatgtaccttccagcata

SEQ ID NO: 68941 - DNA, 110 bp, synthetic construct
  source 1..110: mol_type = other DNA
cccccagcttcacaatcgatgctggaccctttatagatgtacagtttattgcatgtcacatatatctcaataaagctgttggttttttttaagaggaaggtggctgctca

SEQ ID NO: 68942 - DNA, 110 bp, synthetic construct
  source 1..110: mol_type = other DNA
tcacatatatctcaataaagctgttggttttttttaagaggaaggtggctgctcatgcaggggcctctccaaccttgagggaggcatcgtctgctcacagcagaggatga

SEQ ID NO: 68943 - DNA, 110 bp, synthetic construct
  source 1..110: mol_type = other DNA
ctcagcccatgacattgcctactcttttgctaagaataccaaggccatctcaacggcatttcctcatttttcccttttcctacttaaaaatagctctgtaagcaccccct

SEQ ID NO: 68944 - DNA, 110 bp, synthetic construct
  source 1..110: mol_type = other DNA
gcatttcctcatttttcccttttcctacttaaaaatagctctgtaagcacccccttcttccttccttccagcagaggaagcattctccctcctccagtcttccacttcta

SEQ ID NO: 68945 - DNA, 110 bp, synthetic construct
  source 1..110: mol_type = other DNA
aggcatgggtgctctttctcacctctttaggctcttgctggggttttgtaatcatccagaaattgctgacccagcatgctgaggtgatttgtgcagcctcttctccctgt

SEQ ID NO: 68946 - DNA, 110 bp, synthetic construct
  source 1..110: mol_type = other DNA
ccagaaattgctgacccagcatgctgaggtgatttgtgcagcctcttctccctgttttctctgccttctctcctctataaccccttcctccccaaatctaactccctcca

SEQ ID NO: 68947 - DNA, 110 bp, synthetic construct
  source 1..110: mol_type = other DNA
agactaggatatcccttctctaactgaagcaggattactacaggaatggtcttcttggacatcacgttcccccattttcccccagctttatgaagatataacttacatta

SEQ ID NO: 68948 - DNA, 110 bp, synthetic construct
  source 1..110: mol_type = other DNA
tcgtcccctgggactcttcctggcccactgccagtctccagctcaccctgcccttcatcactctgcgaggccacacggactgtactggtacacaaaccccgctgcatgga

SEQ ID NO: 68949 - DNA, 110 bp, synthetic construct
  source 1..110: mol_type = other DNA
catcactctgcgaggccacacggactgtactggtacacaaaccccgctgcatggatacacttgccaccctttcaatcaagacctctctgggacagagctctcttgtggcg

SEQ ID NO: 68950 - DNA, 110 bp, synthetic construct
  source 1..110: mol_type = other DNA
aaggcgctcaatccatgttggaagaatgaacaaatgaatgaatgaagagggcccggtttaggagataccttctgtcagtgtctggcacttcctgacaacaatacaaaatc

SEQ ID NO: 68951 - DNA, 110 bp, synthetic construct
  source 1..110: mol_type = other DNA
ccctgtcaacacattcttaattgtgtgccccctgcctccctcatgctggtgatatttttagtgggctaaatatacttaagcaccaacacccttatctcagccctcaagcc

SEQ ID NO: 68952 - DNA, 110 bp, synthetic construct
  source 1..110: mol_type = other DNA
ttttagtgggctaaatatacttaagcaccaacacccttatctcagccctcaagccaaatgtttgccttggctaatttcctttccatactctcctaatgcacagaagttag

SEQ ID NO: 68953 - DNA, 110 bp, synthetic construct
  source 1..110: mol_type = other DNA
aaagttattgatttgaaagcaaagctacggagctaaggatcagtggttgctagaagttagaggagagggagagatgaatagatggagcacagaaaatttttagggcagtg

SEQ ID NO: 68954 - DNA, 110 bp, synthetic construct; identical to SEQ ID NO: 68953
  source 1..110: mol_type = other DNA

SEQ ID NO: 68955 - DNA, 110 bp, synthetic construct; identical to SEQ ID NO: 68953
  source 1..110: mol_type = other DNA

SEQ ID NO: 68956 - DNA, 110 bp, synthetic construct; identical to SEQ ID NO: 68953
  source 1..110: mol_type = other DNA

SEQ ID NO: 68957 - DNA, 110 bp, synthetic construct
  source 1..110: mol_type = other DNA
aaaagtactcttcactagctatgctttatctctggaaaatgtgtctatgatgcttcttgggttgctagctgaaaatctatcctgtatagggcatttaaaaataaatacat

SEQ ID NO: 68958 - DNA, 110 bp, synthetic construct
  source 1..110: mol_type = other DNA
ttatctctggaaaatgtgtctatgatgcttcttgggttgctagctgaaaatctatcctgtatagggcatttaaaaataaatacatttctcaattgtttgctgctattata

SEQ ID NO: 68959 - DNA, 110 bp, synthetic construct
  source 1..110: mol_type = other DNA
atgccatgactctggactccatcactctttggaaagcagggctcctccacctgctaataagcccatgtggaccagtctgaatgtctttcctttacacttatgtttttaaa

SEQ ID NO: 68960 - DNA, 110 bp, synthetic construct
  source 1..110: mol_type = other DNA
aataagcccatgtggaccagtctgaatgtctttcctttacacttatgtttttaaatagtcaaatttcaagaaacagtttggacaggtttctgttgcctgtgtgtttgtga

SEQ ID NO: 68961 - DNA, 110 bp, synthetic construct
  source 1..110: mol_type = other DNA
cttgtctcaccagggtctcttttcccatcgcccagtcttctgccctgcaatcccaggacgtgcacatcctgacctggctcctttcctcccgccatggctgttcccctccc

SEQ ID NO: 68962 - DNA, 110 bp, synthetic construct
  source 1..110: mol_type = other DNA
ggacgtgcacatcctgacctggctcctttcctcccgccatggctgttcccctccctctgccagggcacctgaggggtcttccaagctgtaggacagccgaccacactccc

SEQ ID NO: 68963 - DNA, 110 bp, synthetic construct
  source 1..110: mol_type = other DNA
tacagaccaagacatcaagcactgtaaatttgagggccagacagtgagggatgggtagtaatgcccacatgtgtctccttgaacacagggcggagacacctggctgacac

SEQ ID NO: 68964 - DNA, 110 bp, synthetic construct
  source 1..110: mol_type = other DNA
agcagggaccacgtttcttgtctctgcagttcccacagaacccaggccagaaacttgtgcccagcagactctcagtaaataacagctaaatagattaatgtgactttcac

SEQ ID NO: 68965 - DNA, 110 bp, synthetic construct
  source 1..110: mol_type = other DNA
tgtgcccagcagactctcagtaaataacagctaaatagattaatgtgactttcacaagccctagctgggccctagtgttaaaggtctcacccaaagtgaagttattccaa

SEQ ID NO: 68966 - DNA, 110 bp, synthetic construct; identical to SEQ ID NO: 68964
  source 1..110: mol_type = other DNA

SEQ ID NO: 68967 - DNA, 110 bp, synthetic construct; identical to SEQ ID NO: 68965
  source 1..110: mol_type = other DNA

SEQ ID NO: 68968 - DNA, 110 bp, synthetic construct
  source 1..110: mol_type = other DNA
tgctgctctggtaggtttgggcgggggttagaagttgctgcagttgaggcaggtgcccaggtgattcatacacgggtcaggtagttgtccccagataaactctgagaagc

SEQ ID NO: 68969 - DNA, 110 bp, synthetic construct
  source 1..110: mol_type = other DNA
cccaggtgattcatacacgggtcaggtagttgtccccagataaactctgagaagctttgtgtcaggcccgatgctgttggcggggtcagattttgatgaattcttgacct

SEQ ID NO: 68970 - DNA, 110 bp, synthetic construct
  source 1..110: mol_type = other DNA
atataaatgttcacatataggtctttctgtggacatatattttcataaagttccaggccttaggatgtaaacaataggagcctttacaaagcaaacaagaatgaaaaatt

SEQ ID NO: 68971 - DNA, 110 bp, synthetic construct
  source 1..110: mol_type = other DNA
gaagaagtaaagccccagttttgtgatgcccagtccaacatcatttgcactgcctcaaattgtatcttgttttgggattcatcttttcccctgcttatcttctcagcctc

SEQ ID NO: 68972 - DNA, 110 bp, synthetic construct
  source 1..110: mol_type = other DNA
ttttttcttttcttttacattgctggtctagttctctgtcagcagtcataaacggaaggtgcattttattttacttttaccccatctctatctacagctgaaatacaaca

SEQ ID NO: 68973 - DNA, 110 bp, synthetic construct
  source 1..110: mol_type = other DNA
aaggtgcattttattttacttttaccccatctctatctacagctgaaatacaacattgaactgttcctcaagtcactcctatatgctattataaaactgttttcatctct

SEQ ID NO: 68974 - DNA, 110 bp, synthetic construct
  source 1..110: mol_type = other DNA
tcaggctgttataaccaaatattataaactaagttgtttaaagaacagacatgtatttctcacgattctagaagctgggaagtccaagatcaaggtactggcaaatacag

SEQ ID NO: 68975 - DNA, 110 bp, synthetic construct
  source 1..110: mol_type = other DNA
tttctcacgattctagaagctgggaagtccaagatcaaggtactggcaaatacagtttctgctgagagctcctggctctcctggttcatgaaactgtcttactctgtgtt

SEQ ID NO: 68976 - DNA, 110 bp, synthetic construct
  source 1..110: mol_type = other DNA
gcatatctaggtgtttaaatgcatttgtggttgttttcatggaagtgaaaatccgttgttcattgtttacaactctttaccagtcctccacctctagttgaactggcttt

SEQ ID NO: 68977 - DNA, 110 bp, synthetic construct
  source 1..110: mol_type = other DNA
ttgttcattgtttacaactctttaccagtcctccacctctagttgaactggctttgagtggctgccttaacttggttttaggtttagacttccttttttttttctcactt

SEQ ID NO: 68978 - DNA, 110 bp, synthetic construct
  source 1..110: mol_type = other DNA
gaatgactacaagccttgtaatctgtagcctgtgtgacattattattattttttagccctgttggaatagcttgattctctacaaccatgcttatattcaaagtgtgggg

SEQ ID NO: 68979 - DNA, 110 bp, synthetic construct
  source 1..110: mol_type = other DNA
tttgaagcctccctctccctgggtacagtggcaggtacaacataggagaagacggagcatgtagaaatagtagcaaaacaatcattttcattccccaaccttagccccgt

SEQ ID NO: 68980 - DNA, 110 bp, synthetic construct
  source 1..110: mol_type = other DNA
aatttagtaccacaaactggattgcttaaacaagagagatttattctctcatagttccagagtctaggagttcaacatcaatgtgttggtagggttagttccttctgagg

SEQ ID NO: 68981 - DNA, 110 bp, synthetic construct
  source 1..110: mol_type = other DNA
tccagagtctaggagttcaacatcaatgtgttggtagggttagttccttctgagggccatgagtgagaaatccattccatgtctctctcctggattctggtgggttgcta

SEQ ID NO: 68982 - DNA, 110 bp, synthetic construct
  source 1..110: mol_type = other DNA
atgtgcacaaaattatctttgcatcctgacctttggccctggaattagattctgttatccaggcaggcacctgttagctcgtcaactgactattggtcctctaggtccac

SEQ ID NO: 68983 - DNA, 110 bp, synthetic construct
  source 1..110: mol_type = other DNA
tatccaggcaggcacctgttagctcgtcaactgactattggtcctctaggtccactactctgccactgcctctccagattcctctagcaattcctccatctcctgcttcc

SEQ ID NO: 68984 - DNA, 110 bp, synthetic construct
  source 1..110: mol_type = other DNA
ccaaagattttaatttccagagcccaacctcctctctcccaaacagaagtaatacagcaagctcaaggtggtcagggggtgatactttggctttcattctgttcacagtg

SEQ ID NO: 68985 - DNA, 110 bp, synthetic construct
  source 1..110: mol_type = other DNA
tgaaatggtccccacccctgctcttcacaggcacgaacaagaagaacatttggcgggcattttccaaagaaatggatctctcctgctgctgcctttagcccacctggggg

SEQ ID NO: 68986 - DNA, 110 bp, synthetic construct
  source 1..110: mol_type = other DNA
ggatggagacctgggatggtgactcactttgaacacctactgatctataggtgccagctggtaccacgggctagacacgccaatgccagctattccctgctggaggagta

SEQ ID NO: 68987 - DNA, 110 bp, synthetic construct
  source 1..110: mol_type = other DNA
agctggtaccacgggctagacacgccaatgccagctattccctgctggaggagtaggagccaggactgagctacagcaaagcaccagaagcacctggggccagaaggccc

SEQ ID NO: 68988 - DNA, 110 bp, synthetic construct
  source 1..110: mol_type = other DNA
ggccaggtctccaatctgcatcctcctagagactatgtcaggtccttaacctgttgagccacaatggatactctgtaagttgttagtattttagattttctccaaatgag

SEQ ID NO: 68989 - DNA, 110 bp, synthetic construct; identical to SEQ ID NO: 68988
  source 1..110: mol_type = other DNA

SEQ ID NO: 68990 - DNA, 110 bp, synthetic construct
  source 1..110: mol_type = other DNA
ccagtgaagaaactttacttaaaatttccaaaaaagctaaacaaatgaagatcgacatacagaataatgtggatcttggacagccagtaaagaataagaaaatcttaaaa

SEQ ID NO: 68991 - DNA, 110 bp, synthetic construct
  source 1..110: mol_type = other DNA
gctatagggcaaagaggtcatgcaagggaggtatagcaggaaagtttagcaagggaacccaaggccaggctgtggagggaagctgggaagtgagtcatgctaaacgaatg

SEQ ID NO: 68992 - DNA, 110 bp, synthetic construct
  source 1..110: mol_type = other DNA
tgggcttctggctatcagcctgtaagtttcttttgttttcatcaagagatgtggaagtattgtatttaaaagagggacaggtgttatctaatatggtactatctgactga

SEQ ID NO: 68993 - DNA, 110 bp, synthetic construct
  source 1..110: mol_type = other DNA
ggtgtgtcaaaaaccaaagaatcgcccatgaatctctcattctttctattccttcaacccatcagctagtgctttctctaaaatgtatccttattcttcccattcatcac

SEQ ID NO: 68994 - DNA, 110 bp, synthetic construct
  source 1..110: mol_type = other DNA
tcaaggtccttatgttaaattatacctgcacagacctatttgccaaataagactacattatcagcttctacgatctaagacgtagaccccattatctttcagaaaactga

SEQ ID NO: 68995 - DNA, 110 bp, synthetic construct
  source 1..110: mol_type = other DNA
aaatatgtgggagcctaagaccttgttctcgaactcatggctgtcagtgtcgttaaaactattcataaacgttctactgcaattgtccagctaagcaatactaccttgca

SEQ ID NO: 68996 - DNA, 110 bp, synthetic construct
  source 1..110: mol_type = other DNA
aaactattcataaacgttctactgcaattgtccagctaagcaatactaccttgcaagggcttccttgaagtcaacttatatttctacagctctagttacagttaagctta

SEQ ID NO: 68997 - DNA, 110 bp, synthetic construct
  source 1..110: mol_type = other DNA
gttttgatggttgaggctggttgggtggctgaaatgtacctatgtgaccagctcactcttgagatcccaccacgagcaaggattaggcttcctgggatagaagtgtttgc

SEQ ID NO: 68998 - DNA, 110 bp, synthetic construct
  source 1..110: mol_type = other DNA
tcactgtgttgagagggcattgcctcttacgtttcctgtctttcatcattctagctgcctattttgacttggagggaggactgcttttctgcatctgttcaatagctaat

SEQ ID NO: 68999 - DNA, 110 bp, synthetic construct
  source 1..110: mol_type = other DNA
tgcctattttgacttggagggaggactgcttttctgcatctgttcaatagctaatatgtccgttcactcaaacaacactttctctccttgcccacttatatccctgcatt

SEQ ID NO: 69000 - DNA, 110 bp, synthetic construct
  source 1..110: mol_type = other DNA
tctttggcttgatgctttattttctaggcccattggggtggcaacatcacttcaaaggatcatcagaatgaccacacagccactccgcttggttcctccgtggggtggct

SEQ ID NO: 69001 - DNA, 110 bp, synthetic construct
  source 1..110: mol_type = other DNA
cctgcaaagctgtctacttttacgtggcagcctgatatgtatgatccaaaaatatctctacccctcttttttcttctaatatccactcacaagcctatagttgcttattc

SEQ ID NO: 69002 - DNA, 110 bp, synthetic construct
  source 1..110: mol_type = other DNA
ctctacccctcttttttcttctaatatccactcacaagcctatagttgcttattcaacaattcctttgaaccagcaagtaaattccaattttatttatgctcccagagca

SEQ ID NO: 69003 - DNA, 110 bp, synthetic construct
  source 1..110: mol_type = other DNA
tgcgctcacctcccagtcctctctagatctccttgcatggtactaaaaccgtcacagttgcagtactgtcatcccatccttatataagcgtaagacagttctgaagctga

SEQ ID NO: 69004 - DNA, 110 bp, synthetic construct
  source 1..110: mol_type = other DNA
agttgcagtactgtcatcccatccttatataagcgtaagacagttctgaagctgactaaatcaactgggattatagcttacttctaaattcagctgggcccttgaagggc

SEQ ID NO: 69005 - DNA, 110 bp, synthetic construct
  source 1..110: mol_type = other DNA
cacacctcctcccacactccttaagctatggtggtccactctctagccctctcaggctgtttccacacaaccaaacatagacatctccccaggactgacttctgaagctt

SEQ ID NO: 69006 - DNA, 110 bp, synthetic construct
  source 1..110: mol_type = other DNA
gctgtttccacacaaccaaacatagacatctccccaggactgacttctgaagcttgagcttcagcacccagtcaccatccgtgtcttttaggctgtggtgcgctgggcag

SEQ ID NO: 69007 - DNA, 110 bp, synthetic construct
  source 1..110: mol_type = other DNA
aaagtctctatttttcatgaagacagctttttcttcctcacaccaaattaatttttttctttttttccccccacggtgttctcctaattgtgcttaggccttccttttaa

SEQ ID NO: 69008 - DNA, 110 bp, synthetic construct
  source 1..110: mol_type = other DNA
tttctttttttccccccacggtgttctcctaattgtgcttaggccttccttttaaaaattctttgaggagctctcttatggcccaatgggttatggatctggcattgtat

SEQ ID NO: 69009 - DNA, 110 bp, synthetic construct; identical to SEQ ID NO: 69007
  source 1..110: mol_type = other DNA

SEQ ID NO: 69010 - DNA, 110 bp, synthetic construct; identical to SEQ ID NO: 69008
  source 1..110: mol_type = other DNA

SEQ ID NO: 69011 - DNA, 110 bp, synthetic construct
  source 1..110: mol_type = other DNA
actctacaccagcctaataagggctctgatcatggatttccaacacctgtcataggcccttgtataaggagataaatgtgagaaagttgttttccttctttctttatttt

SEQ ID NO: 69012 - DNA, 110 bp, synthetic construct
  source 1..110: mol_type = other DNA
agtaatacacattttattactggctaccttgcttctttgcctaacttccctgctggtgctttctgtgacctcccagataaacatttgcatgcacattcttgtctcagggt

SEQ ID NO: 69013 - DNA, 110 bp, synthetic construct
  source 1..110: mol_type = other DNA
gtgctttctgtgacctcccagataaacatttgcatgcacattcttgtctcagggtcagcttttggtggaacccaacataatactccgtgtctgtgctctcatagcaggct

SEQ ID NO: 69014 - DNA, 110 bp, synthetic construct
  source 1..110: mol_type = other DNA
tttggctagtactggttttgcctggggccttgaccttcagtgggttgctgttatggaaacttttgcaatttttagagtcaacatcaaagggagagaaaagaagatgtagt

SEQ ID NO: 69015 - DNA, 110 bp, synthetic construct
  source 1..110: mol_type = other DNA
tatatgagcaatttctttcctggagtaaattttgaaccctatacaagctatttgtaagaattcaactaaaatttctgacaaattacttgaggctgactttggactagcac

SEQ ID NO: 69016 - DNA, 110 bp, synthetic construct
  source 1..110: mol_type = other DNA
tggttcagtctctcatctgccctgctcagcccctccagccttggagggtatgtacaagagagaggggccagtggccacatggtaggaaggagggacattcatgcttccag

SEQ ID NO: 69017 - DNA, 110 bp, synthetic construct
  source 1..110: mol_type = other DNA
agacatgcatggttgtacaatgagacatagacctggacaccagaggtcatggcagttcttggacattagtagtaaatggcggcctgtgatgttggagaccaagcagaatg

SEQ ID NO: 69018 - DNA, 110 bp, synthetic construct
  source 1..110: mol_type = other DNA
tcagagaatccagagaatgcctttctttaatttctctttgcattgattttctgtctcttcagttccatcttgaatggaaaactcttctgtttttcttacttgggctccct

SEQ ID NO: 69019 - DNA, 110 bp, synthetic construct
  source 1..110: mol_type = other DNA
tcttcagttccatcttgaatggaaaactcttctgtttttcttacttgggctccctcccactacccttcctatctactttctgtggagcctccaggcttcatcctggttca

SEQ ID NO: 69020 - DNA, 110 bp, synthetic construct
  source 1..110: mol_type = other DNA
gaaggacagctgttgtgattcatcccttgtggtggtggtgggtatggatgtgactctgtggtgaggaagaccagctgatgcacatagtgttggttctctttttaggtatt

SEQ ID NO: 69021 - DNA, 110 bp, synthetic construct
  source 1..110: mol_type = other DNA
ctgtggtgaggaagaccagctgatgcacatagtgttggttctctttttaggtattgggagtgaaggtattagagacaggatggtctctctctggggagtgaggaaaccgc

SEQ ID NO: 69022 - DNA, 110 bp, synthetic construct
  source 1..110: mol_type = other DNA
agtccattcctcctttactttgaacccaggttaagtttgggacttgttttgctagtagaatgtagcagaagtgaccttttacgatttgcaagcttatgtcccctagagac

SEQ ID NO: 69023 - DNA, 110 bp, synthetic construct
  source 1..110: mol_type = other DNA
tagaatgtagcagaagtgaccttttacgatttgcaagcttatgtcccctagagaccttgcatcttcttttcttttcttggaaccctgcctatctgccatatgagccagtc

SEQ ID NO: 69024 - DNA, 110 bp, synthetic construct; identical to SEQ ID NO: 69022
  source 1..110: mol_type = other DNA

SEQ ID NO: 69025 - DNA, 110 bp, synthetic construct; identical to SEQ ID NO: 69023
  source 1..110: mol_type = other DNA

SEQ ID NO: 69026 - DNA, 110 bp, synthetic construct
  source 1..110: mol_type = other DNA
atacaatcatgtaagccaagtattgtagcacctggaaatttcagtataatgaacattattctagattttaccattgctttagctaacgtgcaataaactctttataaatc

SEQ ID NO: 69027 - DNA, 110 bp, synthetic construct
  source 1..110: mol_type = other DNA
ctccggttttaagcagtctttctgatgtggatggatgaaggctcacaggtgtgtgctgagctccagaataaattctgcaggtgctggtgattgcagtaaaggtctaagtc

SEQ ID NO: 69028 - DNA, 110 bp, synthetic construct
  source 1..110: mol_type = other DNA
gggagctacagaccacactgtgtgatctagaagaagcattaattattgctttaaatcttcctgtttgagaggaatatacaacgaatatttagcacttagctaaaaagtag

SEQ ID NO: 69029 - DNA, 110 bp, synthetic construct
  source 1..110: mol_type = other DNA
tcttcctgtttgagaggaatatacaacgaatatttagcacttagctaaaaagtagaaacatatcttgggaaatgctctcttctagagtcaaggcacgtgtgtcctgtttg

SEQ ID NO: 69030 - DNA, 110 bp, synthetic construct; identical to SEQ ID NO: 69028
  source 1..110: mol_type = other DNA

SEQ ID NO: 69031 - DNA, 110 bp, synthetic construct; identical to SEQ ID NO: 69029
  source 1..110: mol_type = other DNA

SEQ ID NO: 69032 - DNA, 110 bp, synthetic construct
  source 1..110: mol_type = other DNA
taagagatgcctttttgccagttgtgagcatagctaagaataaaaggacagctactctagaatatgcttcaattgcaggatacaggaaatagtgggtcgctgtgctgtgt

SEQ ID NO: 69033 - DNA, 110 bp, synthetic construct
  source 1..110: mol_type = other DNA
tctagaatatgcttcaattgcaggatacaggaaatagtgggtcgctgtgctgtgttggacaaacctgtaatgtttggtaatagtcaccagagtggctgaaatttgaaagt

SEQ ID NO: 69034 - DNA, 110 bp, synthetic construct
  source 1..110: mol_type = other DNA
catcttctttacaccaatggctgtttcctccaatactccacctattctcctttgtcttggctagtctctacactgaagtgggggacttttcagggtgcaggagtttttcc

SEQ ID NO: 69035 - DNA, 110 bp, synthetic construct
  source 1..110: mol_type = other DNA
cttggctagtctctacactgaagtgggggacttttcagggtgcaggagtttttcctctctagctcccttcttggagtgtgggtcctgacccactttgtttctctgtttct

SEQ ID NO: 69036 - DNA, 110 bp, synthetic construct
  source 1..110: mol_type = other DNA
gtcatagagggtgaacctgtgtttcacagaatggacattggcctttgctattttatcttttgaccggaaattaaagctgcctggccagtggagaaacaagtagacaatcc

SEQ ID NO: 69037 - DNA, 110 bp, synthetic construct
  source 1..110: mol_type = other DNA
tcttttgaccggaaattaaagctgcctggccagtggagaaacaagtagacaatcctagtggcactggatttgaatttcagttgtttgtgtatttctattagtggttcctg

SEQ ID NO: 69038 - DNA, 110 bp, synthetic construct
  source 1..110: mol_type = other DNA
tttgccttttcttgccattttagtaactctctctttctatagatctatataggcatagggatacatagttggccctagaacaacacagggcttagaggcactgaccctgc

SEQ ID NO: 69039 - DNA, 110 bp, synthetic construct
  source 1..110: mol_type = other DNA
attgcctgatttctgggcccttgacaattgtgacgacccactgggaggtggcacaagctgctcctgatttcatggccctgggaagtggcagtgactctaaggtaggtgta

SEQ ID NO: 69040 - DNA, 110 bp, synthetic construct
  source 1..110: mol_type = other DNA
tccactgttgccaggttaaagtctaaacatggatgtgggttataaaatttttcacaaaatcaccttttgcttacctcttcagctatatctctagctatttgtcacctcaa

SEQ ID NO: 69041 - DNA, 110 bp, synthetic construct
  source 1..110: mol_type = other DNA
aaaatcaccttttgcttacctcttcagctatatctctagctatttgtcacctcaaactttgtaccatgtattcgtcctatcaattcttttagcaccctgtacttctacac

SEQ ID NO: 69042 - DNA, 110 bp, synthetic construct
  source 1..110: mol_type = other DNA
ttccagtataatcacatgttctttgttctccttgttttggacacagtttccacgtctttttctacattcttaagatgtatggttagcttactgatttgaaatctgtcttc

SEQ ID NO: 69043 - DNA, 110 bp, synthetic construct
  source 1..110: mol_type = other DNA
aaggagttacttgcattgtgtccttagaacccattatttggagactagagggagtgatccactcactcactgtccaaccaaggatcttagctctttccaccaagttaatt

SEQ ID NO: 69044 - DNA, 110 bp, synthetic construct
  source 1..110: mol_type = other DNA
gatccactcactcactgtccaaccaaggatcttagctctttccaccaagttaattcagtctaatgatttaccctgtttttccttcatagaaaattggtatcaattgctag

SEQ ID NO: 69045 - DNA, 110 bp, synthetic construct
  source 1..110: mol_type = other DNA
aagacatcaacattggcttagatgataatgctgttatgaatttccctggcaacacaaacatactcagcttacctttaaaaattattttatccatcaattgaatgccctta

SEQ ID NO: 69046 - DNA, 110 bp, synthetic construct
  source 1..110: mol_type = other DNA
taaaattcagtttcctagtcataccagctacatttcaagtgctcaagggccaccagcctgggcactggtagctaccagttggttagtgcagagtagaacacttccaggag

SEQ ID NO: 69047 - DNA, 110 bp, synthetic construct
  source 1..110: mol_type = other DNA
gcctgggcactggtagctaccagttggttagtgcagagtagaacacttccaggagttctctaatggcctgttggctaagggttcgacattgtcactactgtggctcaagt

SEQ ID NO: 69048 - DNA, 110 bp, synthetic construct; identical to SEQ ID NO: 69046
  source 1..110: mol_type = other DNA

SEQ ID NO: 69049 - DNA, 110 bp, synthetic construct; identical to SEQ ID NO: 69047
  source 1..110: mol_type = other DNA

SEQ ID NO: 69050 - DNA, 110 bp, synthetic construct
  source 1..110: mol_type = other DNA
aaggactggcagccatgctgcctgcagagctagatcctgctacagccaagtgactgggcttgttgcaccatcacctctgaactggagttttctttaaaatcagggagtta

SEQ ID NO: 69051 - DNA, 110 bp, synthetic construct
  source 1..110: mol_type = other DNA
gggcttgttgcaccatcacctctgaactggagttttctttaaaatcagggagttaaataagattttttgcagttctaacttccataacttagtgttttctgtaaatgttt

SEQ ID NO: 69052 - DNA, 110 bp, synthetic construct; identical to SEQ ID NO: 69050
  source 1..110: mol_type = other DNA

SEQ ID NO: 69053 - DNA, 110 bp, synthetic construct; identical to SEQ ID NO: 69051
  source 1..110: mol_type = other DNA

SEQ ID NO: 69054 - DNA, 110 bp, synthetic construct
  source 1..110: mol_type = other DNA
gccgcgggtgcggccctaaaagacaaaagacaaaaaatttttttttaaaatcaaaaagggattgaaatttctagttaaaagagtaacagattataaaaatccaagctgtg

SEQ ID NO: 69055 - DNA, 110 bp, synthetic construct
  source 1..110: mol_type = other DNA
agtcttctgaactctgtaagatagtcattttcttactcaaagaaatgggagcattgggttaatgttttcacatcatatattgcactgccttctgggcacactcaagctat

SEQ ID NO: 69056 - DNA, 110 bp, synthetic construct
  source 1..110: mol_type = other DNA
gggttaatgttttcacatcatatattgcactgccttctgggcacactcaagctatctgtaccctacttgctttggattctttctttcagcaatcgtggatttccaattgc

SEQ ID NO: 69057 - DNA, 110 bp, synthetic construct
  source 1..110: mol_type = other DNA
taaaagggagtgacagagagacatgtatatattaaatttccttgagatctggtgatctgatttctttaggcattggacatatgaacttgagatattttcatgactggatt

SEQ ID NO: 69058 - DNA, 110 bp, synthetic construct
  source 1..110: mol_type = other DNA
tcaatatgcccttttcacaagtgctgttattctaagcaatgacccagaagaacaccattgtgatcattcgaggcctcctgatgtcagctttgatgactgattcccccatc

SEQ ID NO: 69059 - DNA, 110 bp, synthetic construct
  source 1..110: mol_type = other DNA
cattgtgatcattcgaggcctcctgatgtcagctttgatgactgattcccccatcccccatgcaaagaaagaatgcatgtctgccccaatcctcattcctctctgaaaac

SEQ ID NO: 69060 - DNA, 110 bp, synthetic construct; identical to SEQ ID NO: 69058
  source 1..110: mol_type = other DNA

SEQ ID NO: 69061 - DNA, 110 bp, synthetic construct; identical to SEQ ID NO: 69059
  source 1..110: mol_type = other DNA

SEQ ID NO: 69062 - DNA, 110 bp, synthetic construct
  source 1..110: mol_type = other DNA
tgtgtcttattcttttgtcagaaagccatttctttgacattttatattgtctaactttgtgtgtaggtggtaacattgacaataggtatatagatgtagcaggtggtacc

SEQ ID NO: 69063 - DNA, 110 bp, synthetic construct
  source 1..110: mol_type = other DNA
tttgtgtgtaggtggtaacattgacaataggtatatagatgtagcaggtggtacccattcctggggttgtcaggggtggtagaggtgcacatgtacccatagcacacagt

SEQ ID NO: 69064 - DNA, 110 bp, synthetic construct
  source 1..110: mol_type = other DNA
gtgactttgtggtctctccatcttggctgatctccctgccagttaggtgccttcccaggttgtgatttactttcctctttcacagctccctctcagtaaggctggtccta

SEQ ID NO: 69065 - DNA, 110 bp, synthetic construct
  source 1..110: mol_type = other DNA
caggttgtgatttactttcctctttcacagctccctctcagtaaggctggtcctatactaattcctttctatctctctttattcttttattttacccagttatatgtagg

SEQ ID NO: 69066 - DNA, 110 bp, synthetic construct
  source 1..110: mol_type = other DNA
ctgaagtagtaactacaactgcaatagtaatttccacatccaagtaaacattgcttgaagctgggttccttcagccagtgctcggtgaccatgacctctggtgctctgat

SEQ ID NO: 69067 - DNA, 110 bp, synthetic construct
  source 1..110: mol_type = other DNA
tgaagctgggttccttcagccagtgctcggtgaccatgacctctggtgctctgatgaaaggggagaactgtggccaatgtgcaagacttggggacctgtttatgcaaaga

SEQ ID NO: 69068 - DNA, 110 bp, synthetic construct
  source 1..110: mol_type = other DNA
acggctagttttggttgttcctcaaaacaagagaaggctttgcaacaagtctaggtcattgtgtaagctaatatgccacttgtgccacatgagccaacagatcaattgtg

SEQ ID NO: 69069 - DNA, 110 bp, synthetic construct
  source 1..110: mol_type = other DNA
tcattgtgtaagctaatatgccacttgtgccacatgagccaacagatcaattgtgcttgaagtgacggtgacacatggggtgtctaattggagccaatggtagatttcca

SEQ ID NO: 69070 - DNA, 110 bp, synthetic construct
  source 1..110: mol_type = other DNA
ggattctttttgaattagtaccttcattttccttagctatataccagcagtagaattgctggataattaagtagtctatttttttggttttgaggaacctgtgtactata

SEQ ID NO: 69071 - DNA, 110 bp, synthetic construct; identical to SEQ ID NO: 69070
  source 1..110: mol_type = other DNA

SEQ ID NO: 69072 - DNA, 110 bp, synthetic construct
  source 1..110: mol_type = other DNA
gtccagtatgttgctgtagttgcaagaacacagaattagaaaacaaaaccagaccaggggttggggcctggctgactgggccagaagccctggaatcagctggagcagcc

SEQ ID NO: 69073 - DNA, 110 bp, synthetic construct
  source 1..110: mol_type = other DNA
aggggttggggcctggctgactgggccagaagccctggaatcagctggagcagccagagaggcccagggggtgcagatgcctggagcttgtggccagcttgccttggcgc

SEQ ID NO: 69074 - DNA, 110 bp, synthetic construct
  source 1..110: mol_type = other DNA
taacatatgaaacttgatgagtgtgacaataaatatacatgaaaccatcatcacaatcaatgccctaaaaccatccagcatctctatgtctcctccaaccttctattatt

SEQ ID NO: 69075 - DNA, 110 bp, synthetic construct; identical to SEQ ID NO: 69074
  source 1..110: mol_type = other DNA

SEQ ID NO: 69076 - DNA, 110 bp, synthetic construct; identical to SEQ ID NO: 69074
  source 1..110: mol_type = other DNA

SEQ ID NO: 69077 - DNA, 110 bp, synthetic construct; identical to SEQ ID NO: 69074
  source 1..110: mol_type = other DNA

SEQ ID NO: 69078 - DNA, 110 bp, synthetic construct
  source 1..110: mol_type = other DNA
tgtggaatggccatgcataggatctcatcatcatctccctaatcccaccccagtccccacctcaccacctctctctcgaaggcgcctccaagtggctattttaggcttct

SEQ ID NO: 69079 - DNA, 110 bp, synthetic construct
  source 1..110: mol_type = other DNA
cccacctcaccacctctctctcgaaggcgcctccaagtggctattttaggcttctacatagcttgatgttttgcaagctagccatacttcttagactgcaatgcagagca

SEQ ID NO: 69080 - DNA, 110 bp, synthetic construct
  source 1..110: mol_type = other DNA
gtatctccctgccttccatgtactggggccagtttcagattatactctggaagcttctaaggacataataggctcagaaaatgatttgattagatttaaagattccattg

SEQ ID NO: 69081 - DNA, 110 bp, synthetic construct
  source 1..110: mol_type = other DNA
gggccagtttcagattatactctggaagcttctaaggacataataggctcagaaaatgatttgattagatttaaagattccattgactgtttccagtagtaaaaataata

SEQ ID NO: 69082 - DNA, 110 bp, synthetic construct
  source 1..110: mol_type = other DNA
tggtgtacaggctgtcatagggctagtactgttctgctgatgagtgtaaccagttcccagagcctctggtttaggggcatgtaatcttggagcttgtgtgggcacactgg

SEQ ID NO: 69083 - DNA, 110 bp, synthetic construct
  source 1..110: mol_type = other DNA
cccagagcctctggtttaggggcatgtaatcttggagcttgtgtgggcacactggtgggcaaggttaaagcacagggggtcttggtgctagtattggttcactggtggct

SEQ ID NO: 69084 - DNA, 110 bp, synthetic construct
  source 1..110: mol_type = other DNA
cttattggcttcttgttgctttagcttaaaaactacttgaatgctttcatctttactattcatgagtcagtcctatatcctctttatatgtaggagtcaaaattggttta

SEQ ID NO: 69085 - DNA, 110 bp, synthetic construct
  source 1..110: mol_type = other DNA
ttcctgaagctttgagccgtaggcttgcagacatatttgcatagctgttatgatccacaagtccaaaatgataaattttaacttcaagtggccccaaatgctgctcctag

SEQ ID NO: 69086 - DNA, 110 bp, synthetic construct
  source 1..110: mol_type = other DNA
atgctcccctgtactaggaatgtatgttctgtccatgtcccacagtaggggttgccctaaggacgcagctttgggatagtaatgtggtgctgagaacacctgaacagtgc

SEQ ID NO: 69087 - DNA, 110 bp, synthetic construct
  source 1..110: mol_type = other DNA
cctaaggacgcagctttgggatagtaatgtggtgctgagaacacctgaacagtgcatgtgactgagcccagttaagtcctctatatcagattctgctggatgagtgcaga

SEQ ID NO: 69088 - DNA, 110 bp, synthetic construct
  source 1..110: mol_type = other DNA
atttatagatgctaaatttgtccaaacaaattttaaaaagcaactgaacaatgacttcataagctttccaaatgcaacatctttgccaagggattcttaccaatgccaac

SEQ ID NO: 69089 - DNA, 110 bp, synthetic construct
  source 1..110: mol_type = other DNA
ttcataagctttccaaatgcaacatctttgccaagggattcttaccaatgccaacagtagttgtaaataattttcactgccagattttttttcaacagaacaaaggtaaa

SEQ ID NO: 69090 - DNA, 110 bp, synthetic construct; identical to SEQ ID NO: 69088
  source 1..110: mol_type = other DNA

SEQ ID NO: 69091 - DNA, 110 bp, synthetic construct; identical to SEQ ID NO: 69089
  source 1..110: mol_type = other DNA

SEQ ID NO: 69092 - DNA, 110 bp, synthetic construct
  source 1..110: mol_type = other DNA
tgatatatttgaaatacacgtccagcatgaaatagctatgtaaccttcaaaaatttacttaacttctctgagccccattgtccaaacagattaaatattatcacctaatt

SEQ ID NO: 69093 - DNA, 110 bp, synthetic construct
  source 1..110: mol_type = other DNA
atgtcccatagaaaccaatacctcttctaaccactctcaaaggcacagcttccagggtccccacaagggacacacccaattataagagtcattggacttggacaggccca

SEQ ID NO: 69094 - DNA, 110 bp, synthetic construct
  source 1..110: mol_type = other DNA
ggtccccacaagggacacacccaattataagagtcattggacttggacaggcccaagcatggcatgcccattaggtctatagggttcatttattccttttcccactgcac

SEQ ID NO: 69095 - DNA, 110 bp, synthetic construct
  source 1..110: mol_type = other DNA
ctgtaggacacagcccctcttccaccccgcaacctcctcttagctcaccccctggcctgaggctggagggcctagagagcaccctgggagaaaactgtgatttgatccta

SEQ ID NO: 69096 - DNA, 110 bp, synthetic construct
  source 1..110: mol_type = other DNA
agcaaatcccacttaaaatgtcaactacagataacttaaagccatctctttttccaaagggtacattgagaatgttacccatttataaattgtaccctaatgtccttgtt

SEQ ID NO: 69097 - DNA, 110 bp, synthetic construct
  source 1..110: mol_type = other DNA
aaagggtacattgagaatgttacccatttataaattgtaccctaatgtccttgtttaaacagcgacaaacagggcaactcaatttgttgagggtctgtgtgttcttaaac

SEQ ID NO: 69098 - DNA, 110 bp, synthetic construct
  source 1..110: mol_type = other DNA
ccaggataacacctttcaaaactttttttttccacgttagagcgaagaaagcaagatactgaaaatagctttctgatttgaaggcctgatgtcatcaatatgctattttt

SEQ ID NO: 69099 - DNA, 110 bp, synthetic construct
  source 1..110: mol_type = other DNA
atactgaaaatagctttctgatttgaaggcctgatgtcatcaatatgctatttttgttctttgccaggttaacagaatttattgcagcaattaatgcaaaacatatgtgc

SEQ ID NO: 69100 - DNA, 110 bp, synthetic construct
  source 1..110: mol_type = other DNA
taacttttctacttactctcctggcttttaccacatcaccaccatgtatgactgccttttgtgagccccttctgttttcattcgtcttagatcccatggtgcacagcttc

SEQ ID NO: 69101 - DNA, 110 bp, synthetic construct
  source 1..110: mol_type = other DNA
cttttgtgagccccttctgttttcattcgtcttagatcccatggtgcacagcttcagctattctttcttcaatgtccacaacttccttcacccattgtctttctgtcaaa

SEQ ID NO: 69102 - DNA, 110 bp, synthetic construct
  source 1..110: mol_type = other DNA
tgctattccctcagcctagaatacatttttttccccttattctgcatctggatatgtccacataaccacaaaatcttacctctttttttctgtcagttttgttgagctat

SEQ ID NO: 69103 - DNA, 110 bp, synthetic construct
  source 1..110: mol_type = other DNA
gtccacataaccacaaaatcttacctctttttttctgtcagttttgttgagctataattgacatatagcactatataagtttaatgtgtacagtataatgattggactca

SEQ ID NO: 69104 - DNA, 110 bp, synthetic construct; identical to SEQ ID NO: 69102
  source 1..110: mol_type = other DNA

SEQ ID NO: 69105 - DNA, 110 bp, synthetic construct
  source 1..110: mol_type = other DNA
cttattctgcatctggatatgtccacataaccacaaaatcttacctctttttttctgtcagttttgttgagctataattgacatatagcactatataagtttaatgtgta

SEQ ID NO: 69106 - DNA, 110 bp, synthetic construct
  source 1..110: mol_type = other DNA
gttagatccacatttgcttgcgatctttttttttaaatggttaatctttcagcttttacaaaatgtagtgtaatttgaaaatgagcaatttatctacctggagttccctg

SEQ ID NO: 69107 - DNA, 110 bp, synthetic construct; identical to SEQ ID NO: 69106
  source 1..110: mol_type = other DNA

SEQ ID NO: 69108 - DNA, 110 bp, synthetic construct
  source 1..110: mol_type = other DNA
tgaatcaagtctatggcataagcatctttttacctgagacatgttcctgtgacctctgctcagaccggatggcagcaagacatgtaggaggaaattttccaatacctgac

SEQ ID NO: 69109 - DNA, 110 bp, synthetic construct
  source 1..110: mol_type = other DNA
ctgctcagaccggatggcagcaagacatgtaggaggaaattttccaatacctgacttgcaaacctcagcctagactatgctggctgaagttaagcaagcaaagtggggga

SEQ ID NO: 69110 - DNA, 110 bp, synthetic construct; identical to SEQ ID NO: 69108
  source 1..110: mol_type = other DNA

SEQ ID NO: 69111 - DNA, 110 bp, synthetic construct; identical to SEQ ID NO: 69109
  source 1..110: mol_type = other DNA

SEQ ID NO: 69112 - DNA, 110 bp, synthetic construct
  source 1..110: mol_type = other DNA
gagaacaaccagactacagtaaaaattagccagttggaaaattttaaattgcctaactccttcaaaatgcaagccaataaatctgcatcatcttgaaattatcccattaa

SEQ ID NO: 69113 - DNA, 110 bp, synthetic construct
  source 1..110: mol_type = other DNA
caaagtgacccagtcatacatatatattctttttctcatattacttcccaccatgttctatcccaagatatttctctatgctgtacagtagatttatgtttctaaattaa

SEQ ID NO: 69114 - DNA, 110 bp, synthetic construct; identical to SEQ ID NO: 69113
  source 1..110: mol_type = other DNA

SEQ ID NO: 69115 - DNA, 110 bp, synthetic construct; identical to SEQ ID NO: 69113
  source 1..110: mol_type = other DNA

SEQ ID NO: 69116 - DNA, 110 bp, synthetic construct; identical to SEQ ID NO: 69113
  source 1..110: mol_type = other DNA

SEQ ID NO: 69117 - DNA, 110 bp, synthetic construct
  source 1..110: mol_type = other DNA
gctatgacaactggatttaagcaagaggcagctaaaagagtactcagaaaggtggaaagaggaaagaggactggttagagacactggaacctgaggaacaacacagtgcc

SEQ ID NO: 69118 - DNA, 110 bp, synthetic construct
  source 1..110: mol_type = other DNA
acgtcaggtccataatcttctgagccacaatgagaactccagagtatatattttctactgcacattttttgtttaatgtggacccatttgaatatatctatgatgcagaa

SEQ ID NO: 69119 - DNA, 110 bp, synthetic construct
  source 1..110: mol_type = other DNA
tactgcacattttttgtttaatgtggacccatttgaatatatctatgatgcagaaagagatgaaacaactatgttcttgaagattagtgacaccatgggaacctgaacag

SEQ ID NO: 69120 - DNA, 110 bp, synthetic construct
  source 1..110: mol_type = other DNA
gcctccagaggacctaaaatgtgccaacagccatgtaagtgagcttggatgcaaacctcagctgagccttaaattgacaataacctcaatatgtacgttgattgtagctt

SEQ ID NO: 69121 - DNA, 110 bp, synthetic construct
  source 1..110: mol_type = other DNA
cctcagctgagccttaaattgacaataacctcaatatgtacgttgattgtagctttgggagagcctctgagctagaggtcctagctaagtcttgtctagattcctgactc

SEQ ID NO: 69122 - DNA, 110 bp, synthetic construct
  source 1..110: mol_type = other DNA
atttgattataatgtgttatgatatatttctctgcaagttaaccctgtatgggactgtctgtgcttcctgtattaggtgactgtttccttccccatgctagggaattttt

SEQ ID NO: 69123 - DNA, 110 bp, synthetic construct
  source 1..110: mol_type = other DNA
tgtctgtgcttcctgtattaggtgactgtttccttccccatgctagggaatttttcagctattatctccaaatattttctcagcctctttctctctcttctcctttagga

SEQ ID NO: 69124 - DNA, 110 bp, synthetic construct
  source 1..110: mol_type = other DNA
ttacagggcaatatcactggtaaacatagttgtaaagtccttaacaaaatactacctaattgaatccaacaacacattgataggttcatacaccatgatcaggtgggctt

SEQ ID NO: 69125 - DNA, 110 bp, synthetic construct
  source 1..110: mol_type = other DNA
acacttaaaagaacacagtttgaagaattacgggcacaggatatgtattggttacattcctcctttttaattattccttcaataaccaaatcaaaatagagtagacttca

SEQ ID NO: 69126 - DNA, 110 bp, synthetic construct
  source 1..110: mol_type = other DNA
ctgtttcaaaactaatctggtagacatctgaaccaccgttttccaataaaagcttccttatgagttgagaccatggcccagttctgaataatcattgacaatctccagta

SEQ ID NO: 69127 - DNA, 110 bp, synthetic construct
  source 1..110: mol_type = other DNA
ccttatgagttgagaccatggcccagttctgaataatcattgacaatctccagtacaacgctggacttctgattagatggcttctgagtctccataatttctcccccata

SEQ ID NO: 69128 - DNA, 110 bp, synthetic construct
  source 1..110: mol_type = other DNA
taaagctaagactcaaacacagctttttctggtactaaatctcctgcacttgtcaccagaatttgaagcctcaacattttgcacagaagagaaacaaagagctctttaaa

SEQ ID NO: 69129 - DNA, 110 bp, synthetic construct
  source 1..110: mol_type = other DNA
gcacttgtcaccagaatttgaagcctcaacattttgcacagaagagaaacaaagagctctttaaaaatagagaaaaaggacaaagtaatatttttattaaatatgatgga

SEQ ID NO: 69130 - DNA, 110 bp, synthetic construct
  source 1..110: mol_type = other DNA
aaggagaaactgttgcacctggaggagtcccctcaccagtggggagaccagctatgtcaggaaaaaagattcagatgctctgaggaaagcacaacagccagtctgtgata

SEQ ID NO: 69131 - DNA, 110 bp, synthetic construct
  source 1..110: mol_type = other DNA
gtaaagtcgtggaactgaaattctccttggaggagaggcaatgatgaacttcaggttttaaactagacaagactaggagttcccgtcatggctcagtggttaacgaatct

SEQ ID NO: 69132 - DNA, 110 bp, synthetic construct
  source 1..110: mol_type = other DNA
cctttaaaggatgaaaatgatctaatgatgtaagtcattgttatttttatcttgtacttggcaccttttttagctttaactcaatcctaaactcttaatgtggtgtttcc

SEQ ID NO: 69133 - DNA, 110 bp, synthetic construct
  source 1..110: mol_type = other DNA
tataaatcattttctttcccctttgagatgtaaatattttaaaagcttcttgccagttttacaacctagccatagtctttttcaaggacctgggagccacccctttgaaa

SEQ ID NO: 69134 - DNA, 110 bp, synthetic construct
  source 1..110: mol_type = other DNA
tttaaacaactgtggcaggatcaaggatggagataaaggctattaccttggtgataaagttttcagtacatgagaaaaaagtgaaatttaaccatataacagtggtaaag

SEQ ID NO: 69135 - DNA, 110 bp, synthetic construct
  source 1..110: mol_type = other DNA
gcaatagatttgctaatagaagttctcttttctctcaatgctgcatgaagcccttacatacataccccctgtgtctatgtacattgaatgagtattgatctaaggcatca

SEQ ID NO: 69136 - DNA, 110 bp, synthetic construct
  source 1..110: mol_type = other DNA
caggaagaagcagtttccctgctttttcgagtttctggagactgtcaacatgggccatagctccccatcacattgtctttcccttgtgcttctgtcttatgtaaaaaaat

SEQ ID NO: 69137 - DNA, 110 bp, synthetic construct
  source 1..110: mol_type = other DNA
tctctgctgcaaaaatcactcttcttcgttaaaacctcaacactcacagctgcttgctgagctttactctccaccaagctgcagacgctgcattttctctgattgtattt

SEQ ID NO: 69138 - DNA, 110 bp, synthetic construct
  source 1..110: mol_type = other DNA
tttcagtgaacaaaaatgaaaatgtctatggaaactaataatcacaaaaatgcatgaatatgtatttctttctcaggccactaatccaatgagggttgtaagagcttctg

SEQ ID NO: 69139 - DNA, 110 bp, synthetic construct
  source 1..110: mol_type = other DNA
ggctctagccaaaagaaagtagatttgttttattcctatttgactctccactgcctccgtatattaactactcaaaagtttttattattcatttaattatagctctattc

SEQ ID NO: 69140 - DNA, 110 bp, synthetic construct; identical to SEQ ID NO: 69139
  source 1..110: mol_type = other DNA

SEQ ID NO: 69141 - DNA, 110 bp, synthetic construct; identical to SEQ ID NO: 69139
  source 1..110: mol_type = other DNA

SEQ ID NO: 69142 - DNA, 110 bp, synthetic construct; identical to SEQ ID NO: 69139
  source 1..110: mol_type = other DNA

SEQ ID NO: 69143 - DNA, 110 bp, synthetic construct
  source 1..110: mol_type = other DNA
ccactggtgctggctgaagtggcctgccaagaggggcaatacagaccttaaattattcccagcagatatggcgcttcccattcctacttttggggttgtatactatagct

SEQ ID NO: 69144 - DNA, 110 bp, synthetic construct
  source 1..110: mol_type = other DNA
ttcccagcagatatggcgcttcccattcctacttttggggttgtatactatagctcgctttataaagtttggagtatgtcctaacaggtatctgtgggcagatcacagag

SEQ ID NO: 69145 - DNA, 110 bp, synthetic construct
  source 1..110: mol_type = other DNA
tggttcctttgtttcaagttcataagggtaggaatatgttattctgttgcttcagttttgtgtccagggatgttttcttctcctacatctgcctgttgaaggccattaac

SEQ ID NO: 69146 - DNA, 110 bp, synthetic construct
  source 1..110: mol_type = other DNA
ccaatgaagtagggttattgactttctgagcttagcttattaaagtccatacagcttctgcttggtttttgaacactggcccggcagaaactctcccttggaatccaatt

SEQ ID NO: 69147 - DNA, 110 bp, synthetic construct
  source 1..110: mol_type = other DNA
ttctgcttggtttttgaacactggcccggcagaaactctcccttggaatccaattgctatgctgtaaaaaacctagccacctagaaaggtcttgtgttggtaatctgtct

SEQ ID NO: 69148 - DNA, 110 bp, synthetic construct
  source 1..110: mol_type = other DNA
gaagaagcaagcagtcttgttatgggctgccatgttgggaggcccatgtaacaggggactgtggacagcttctggctggagggcagcaagaaaccaaaggcctcagtcat

SEQ ID NO: 69149 - DNA, 110 bp, synthetic construct
  source 1..110: mol_type = other DNA
gtgtagccctaaaaagcaaacacacaaaaaaacaaaaaacaaaagaaagaaactataggcaacaaatgatttggggctggatcttggattggaggggaaaaaaattacca

SEQ ID NO: 69150 - DNA, 110 bp, synthetic construct
  source 1..110: mol_type = other DNA
taggcaacaaatgatttggggctggatcttggattggaggggaaaaaaattaccataaagaatgttattgacaaagttggaatatgtagagaataaaatatagtgaatca

SEQ ID NO: 69151 - DNA, 110 bp, synthetic construct
  source 1..110: mol_type = other DNA
tcttccaagggctcccatcttgaagagcctcagacaagctgatcaagtatactcgacaggttgactgagtggatgaactcctcttcaagggatgtgttgcggtctttttc

SEQ ID NO: 69152 - DNA, 110 bp, synthetic construct
  source 1..110: mol_type = other DNA
gattcacccttgcttgttattaatttcagaaatatatattatagatgatcattccttgtgcattgctccatgtaggaaagttggcaatttatgctttaaaatgttggtcc

SEQ ID NO: 69153 - DNA, 110 bp, synthetic construct
  source 1..110: mol_type = other DNA
gtgaggaaattcattttgaactcccttaaattcaggcattatgcaaccatagtagtgacccttcagatggataagccttagataggcccctaaattctttaaaactgttt

SEQ ID NO: 69154 - DNA, 110 bp, synthetic construct
  source 1..110: mol_type = other DNA
tgacccttcagatggataagccttagataggcccctaaattctttaaaactgtttataaaaatgggtattcttgtgtaggcaggagggagtagtggcgagtgtgtccaca

SEQ ID NO: 69155 - DNA, 110 bp, synthetic construct
  source 1..110: mol_type = other DNA
tcctctttttgacttacttccttcagtatgagaatctctagttccatatcgctattactggcattattttgtcctttttttggctgagtagtattccattttataaatgt

SEQ ID NO: 69156 - DNA, 110 bp, synthetic construct; identical to SEQ ID NO: 69155
  source 1..110: mol_type = other DNA

SEQ ID NO: 69157 - DNA, 110 bp, synthetic construct
  source 1..110: mol_type = other DNA
tggctctactcatcaccagcagttgagactctgaataaatttttaatcattctgtgtataatattcctcatttaaaaaatcaagataacaatatatatcctatggggttg

SEQ ID NO: 69158 - DNA, 110 bp, synthetic construct; identical to SEQ ID NO: 69157
  source 1..110: mol_type = other DNA

SEQ ID NO: 69159 - DNA, 110 bp, synthetic construct
  source 1..110: mol_type = other DNA
ttattttatataaagtttcagaaagtttaaggtttgaggtcacaagtaaggccttggtgcctaatccatctcccttttttacgatgtagagttgacacaatataagtgca

SEQ ID NO: 69160 - DNA, 110 bp, synthetic construct
  source 1..110: mol_type = other DNA
ggtgcctaatccatctcccttttttacgatgtagagttgacacaatataagtgcaaataatgtgattttctccctgaattttacttctaattattaattgcaccatatga

SEQ ID NO: 69161 - DNA, 110 bp, synthetic construct
  source 1..110: mol_type = other DNA
tagccacaagatctatatcacagctctatgtgatcatgaagtcaagcatcagtgatactcattaagccctacttgctagggattggatggatggttgtatgtttgtggat

SEQ ID NO: 69162 - DNA, 110 bp, synthetic construct
  source 1..110: mol_type = other DNA
ccgccccggcagccccgcgcttccctgggaaatgtagtccaattgctgcgatgcggccggagaaactacaccgccggctggagaaaggacttcatttaccatgaggacgc

SEQ ID NO: 69163 - DNA, 110 bp, synthetic construct
  source 1..110: mol_type = other DNA
tttaaaggttatattccatttttaggttttataaaacatggactatatcctctgagttgtacagtgtaactttttgtttgaaggttaccacagagattggaggataagtg

SEQ ID NO: 69164 - DNA, 110 bp, synthetic construct
  source 1..110: mol_type = other DNA
caaacatctgttaggcttcttaaataactttttacttttaatgcccagcatggtactaggtactaaataattgtttgttcatttgtcacaaatacatgtgcaaaaatgtg

SEQ ID NO: 69165 - DNA, 110 bp, synthetic construct
  source 1..110: mol_type = other DNA
accagctgcaccttggtgaatgggttcatctcccaggcctggggcaccacaaaagcatgcccaggtgcctggacaaagctcatttccggtggacccaggggagtgcagct

SEQ ID NO: 69166 - DNA, 110 bp, synthetic construct
  source 1..110: mol_type = other DNA
catgcccaggtgcctggacaaagctcatttccggtggacccaggggagtgcagcttccagtgaaaagcttcagggcaaggaccacatcccttccctgctctccccacatg

SEQ ID NO: 69167 - DNA, 110 bp, synthetic construct
  source 1..110: mol_type = other DNA
ccctaagagttcaagttacaactcttgttttgcagattgggaaacaaccacaacagggagttcccactgtggcacagaggaaacaaacgtgactggtatccatgaggatg

SEQ ID NO: 69168 - DNA, 110 bp, synthetic construct
  source 1..110: mol_type = other DNA
aatgtataactgtgtctcaaatcgtcaggtgctaaaactttgctaggtgacgaatacaattctccgtagctccttctctctcctgtagtgatttcttttcttaagtactg

SEQ ID NO: 69169 - DNA, 110 bp, synthetic construct
  source 1..110: mol_type = other DNA
acagaaaaattatctgtgtacatctaaaagtattggtattttaaaagtctgaaatgccctatagaactttctgtggtgacagaactgttctctatctgcactgtccaata

SEQ ID NO: 69170 - DNA, 110 bp, synthetic construct
  source 1..110: mol_type = other DNA
ttttggttcttttctcattttaattttagaagctttcagttctttggttttgtttctaattaagatcaaggccctgaaatttgaataggaagttctgtgggtgtggccgg

SEQ ID NO: 69171 - DNA, 110 bp, synthetic construct
  source 1..110: mol_type = other DNA
aagctctagatatttagaagtattcagaagtttgaagaaagatataagcactttttccccaaagtaattcagtccagtcagtatctattaaactctccatgacaaaatat

SEQ ID NO: 69172 - DNA, 110 bp, synthetic construct
  source 1..110: mol_type = other DNA
gctctttggaaggatgtgtttatgtgacaagcatttgaaacaggtctttgagtatgtcagtgtctctgggtacctcacacttacttaatcagagagggctagcttatgta

SEQ ID NO: 69173 - DNA, 110 bp, synthetic construct
  source 1..110: mol_type = other DNA
gtcagtgtctctgggtacctcacacttacttaatcagagagggctagcttatgtatatttttatactttgggtttccccatgatatttcttcagaaaagtagctccaatt

SEQ ID NO: 69174 - DNA, 110 bp, synthetic construct
  source 1..110: mol_type = other DNA
tcaagttaaacgaaacaaacatttgaaaaccactgatgtagcacaacttaaaagaaccaggcagtaatgcctcatctgagatatgatctggtcagctgttccatcccagg

SEQ ID NO: 69175 - DNA, 110 bp, synthetic construct
  source 1..110: mol_type = other DNA
accaggcagtaatgcctcatctgagatatgatctggtcagctgttccatcccaggttgtgtgaccttgggcatgtcttcaagactctagaaacctgtgtcttacccttca

SEQ ID NO: 69176 - DNA, 110 bp, synthetic construct; identical to SEQ ID NO: 69174
  source 1..110: mol_type = other DNA

SEQ ID NO: 69177 - DNA, 110 bp, synthetic construct; identical to SEQ ID NO: 69175
  source 1..110: mol_type = other DNA

SEQ ID NO: 69178 - DNA, 110 bp, synthetic construct
  source 1..110: mol_type = other DNA
ttaatcagacattttcagtgtttcagctacttgaccatatcgaagtaaatatattcactttgcttctaaatatgtctgtgattactaatgattccttcagagaaaaacct

SEQ ID NO: 69179 - DNA, 110 bp, synthetic construct
  source 1..110: mol_type = other DNA
ctctgtccagaagtttgtattcttgtcctgagttgggttgtttgcccatccctgaatgaattggcctggcttggggatgtggtgagctgattggctctggcctgtgtcca

SEQ ID NO: 69180 - DNA, 110 bp, synthetic construct
  source 1..110: mol_type = other DNA
atgaattggcctggcttggggatgtggtgagctgattggctctggcctgtgtccagtgtaccacctggagttcagtggggccagcgtcaacaaaaccatgtggtctgaga

SEQ ID NO: 69181 - DNA, 110 bp, synthetic construct
  source 1..110: mol_type = other DNA
ttcttgaaacctaggaatctgttactttaaatgttaaaaggggctttgcacatgtgattgagattaaggactatgagctggtgttatccaggtgggcccaacctaatcac

SEQ ID NO: 69182 - DNA, 110 bp, synthetic construct
  source 1..110: mol_type = other DNA
gattgagattaaggactatgagctggtgttatccaggtgggcccaacctaatcacatgcatctttaaaaagggctcccctttcccagctgtagtcagaggctagatgcat

SEQ ID NO: 69183 - DNA, 110 bp, synthetic construct
  source 1..110: mol_type = other DNA
catttgtgtttgatgtaggtaaaatgtctgaaattctccagttatccccttgtcaatccttattgcacctatagtggtaggtcatgtcaaatattatttttattgcatag

SEQ ID NO: 69184 - DNA, 110 bp, synthetic construct
  source 1..110: mol_type = other DNA
tattgatacacgtaagcgaggggcctttaaggctgtcaatcagatcttttgtggaatcatggaccatctttgaaagagtagcatgctaaaggtttaaaataaattattcc

SEQ ID NO: 69185 - DNA, 110 bp, synthetic construct
  source 1..110: mol_type = other DNA
ttaagttacagtggattggaactgttatccctttatatgtgcctggatgtatgccaaatgtgaagctgtgctggttcttatggagtgctaaccttagaacaggagatgaa

SEQ ID NO: 69186 - DNA, 110 bp, synthetic construct
  source 1..110: mol_type = other DNA
aaatgtgaagctgtgctggttcttatggagtgctaaccttagaacaggagatgaaataaacattccctttcttaaatggtcatcaatgttatagaatacatatgatcaat

SEQ ID NO: 69187 - DNA, 110 bp, synthetic construct; identical to SEQ ID NO: 69185
  source 1..110: mol_type = other DNA

SEQ ID NO: 69188 - DNA, 110 bp, synthetic construct; identical to SEQ ID NO: 69186
  source 1..110: mol_type = other DNA

SEQ ID NO: 69189 - DNA, 110 bp, synthetic construct
  source 1..110: mol_type = other DNA
gattctttagaaagtttttgaagaagtattcttactgttggcttactccaggcgcattagaagagaaaatttatttataattttacacacattttgtagcaatcagtgtt

SEQ ID NO: 69190 - DNA, 110 bp, synthetic construct
  source 1..110: mol_type = other DNA
aattcagaatgctctcagtagcataccctaattatcaagaaaactgtgcattcattgcaagactctgcttttagttctttcacagctaacataaatgttcttatgctttg

SEQ ID NO: 69191 - DNA, 110 bp, synthetic construct
  source 1..110: mol_type = other DNA
cagtagcataccctaattatcaagaaaactgtgcattcattgcaagactctgcttttagttctttcacagctaacataaatgttcttatgctttgattaaattttatatg

SEQ ID NO: 69192 - DNA, 110 bp, synthetic construct
  source 1..110: mol_type = other DNA
gcatcatggactttttaagtaatctgaatactaaagggttaactcaaggctcaatggggagctgtagagatctaggatcttactctagagctgaggctggtatccattct

SEQ ID NO: 69193 - DNA, 110 bp, synthetic construct
  source 1..110: mol_type = other DNA
gggatggaagtctcttcaggatttccttgagaccatgactgctaggaagctcttcatgtctgagtgaccagaaaatcgaagggtggaaacgcctgtacatcctggcatga

SEQ ID NO: 69194 - DNA, 110 bp, synthetic construct
  source 1..110: mol_type = other DNA
ttccccccctcctaaaaaaatgaaaaacttctttaaagctactaaattgtgtttagctgtgtaatggccaggaatctttaggatctcctgaaattatgacacaaaatcaa

SEQ ID NO: 69195 - DNA, 110 bp, synthetic construct
  source 1..110: mol_type = other DNA
agattcaggttgtaattttggtcttttagctcactgaaatagggcaggtcatttaatctttctcagcatcattttttttttttaatttgcaaatatagagagtaagactc

SEQ ID NO: 69196 - DNA, 110 bp, synthetic construct
  source 1..110: mol_type = other DNA
gaaatgagctgcagagattgaggctagtaactgagctgaacagtctcatttgttttttgcttgtttccttgtaagggagcaatgagaatggaaatagggtggtcagtcca

SEQ ID NO: 69197 - DNA, 110 bp, synthetic construct
  source 1..110: mol_type = other DNA
tttaattcagaatgagtatacagttcttgatgaaaatagtcaaggaaataaaatatttcccttttgaagtctttggcagtataagatggacatcttttgtcagttctcca

SEQ ID NO: 69198 - DNA, 110 bp, synthetic construct; identical to SEQ ID NO: 69197
  source 1..110: mol_type = other DNA

SEQ ID NO: 69199 - DNA, 110 bp, synthetic construct
  source 1..110: mol_type = other DNA
ttgtgcataaccctggaccactcttcgggcatggtaacttgtaaatctcataaaggccatagacaaaaacagctgtagaagaaagaataggaaatagaatttaaaaaaaa

SEQ ID NO: 69200 - DNA, 110 bp, synthetic construct
  source 1..110: mol_type = other DNA
aacatttctttgaatttgtttcacgcttctatcaggatactttcctcctttaggtcctgttctatgtcttgtgatgctgaatctgtgcttatgaatgattcctatccatt

SEQ ID NO: 69201 - DNA, 110 bp, synthetic construct
  source 1..110: mol_type = other DNA
aaacctgagttctccaacactctgagtgcttgcttgatttttcactgggtaaaagagctgatacagggctgtcaccagagctagtacactacagccacagggctgtcgct

SEQ ID NO: 69202 - DNA, 110 bp, synthetic construct
  source 1..110: mol_type = other DNA
aacactctgagtgcttgcttgatttttcactgggtaaaagagctgatacagggctgtcaccagagctagtacactacagccacagggctgtcgctagagctgatacactg

SEQ ID NO: 69203 - DNA, 110 bp, synthetic construct
  source 1..110: mol_type = other DNA
aggtggctcggattccgcattacagtggctgtggcatggaacagcagctatagctctgatttgactccagcctgagaacgttcacatgccacaggtgtagccctataaag

SEQ ID NO: 69204 - DNA, 110 bp, synthetic construct; identical to SEQ ID NO: 69203
  source 1..110: mol_type = other DNA

SEQ ID NO: 69205 - DNA, 110 bp, synthetic construct
  source 1..110: mol_type = other DNA
cagataagtggttggctcctacctcctgagagtaaggaggagaggtgggaaaacaatggcaacatggagaaaagaaggcagctcttccccagtgaccacaagagcacagc

SEQ ID NO: 69206 - DNA, 110 bp, synthetic construct
  source 1..110: mol_type = other DNA
ccatggttgcttccccaagttcttctcctcccttctcccaataacttcagtagctgctctttgccttaatgacagtcccttatgggaacatcccaggcagcagtatgtgt

SEQ ID NO: 69207 - DNA, 110 bp, synthetic construct
  source 1..110: mol_type = other DNA
gctctttgccttaatgacagtcccttatgggaacatcccaggcagcagtatgtgtggaagtgtgattgttaccagccttgacagcaggtagtacagtgaagtacaagtag

SEQ ID NO: 69208 - DNA, 110 bp, synthetic construct; identical to SEQ ID NO: 69206
  source 1..110: mol_type = other DNA

SEQ ID NO: 69209 - DNA, 110 bp, synthetic construct; identical to SEQ ID NO: 69207
  source 1..110: mol_type = other DNA

SEQ ID NO: 69210 - DNA, 110 bp, synthetic construct
  source 1..110: mol_type = other DNA
ttctcctattgacaaacaggaaagctatcctgttggagattttgtgaactacacagtacagaacagaactcatttagagcatattcggataatggggaaattaatctgta

SEQ ID NO: 69211 - DNA, 110 bp, synthetic construct
  source 1..110: mol_type = other DNA
tacaatacatgtagtagtggtggttgtgactgtgtgatttcaggccagaacccaaaaattgttccatgcctctcccttacacactacagaatgaagtggttgtagacccc

SEQ ID NO: 69212 - DNA, 110 bp, synthetic construct
  source 1..110: mol_type = other DNA
aaaattggacttgagtttttctgctactgcagatttaataattatctaaggtctacattcagaattgtacacacatttggttgtagaaaaagataattcacggggtgtgc

SEQ ID NO: 69213 - DNA, 110 bp, synthetic construct
  source 1..110: mol_type = other DNA
aaggagttgaaatgtttttattcatcacgaagacagtgccagggtcagttttcccaacgtgtttaacttcaatcttctcagtccggggagttaaggatagctgcctgttt

SEQ ID NO: 69214 - DNA, 110 bp, synthetic construct
  source 1..110: mol_type = other DNA
aacgtgtttaacttcaatcttctcagtccggggagttaaggatagctgcctgtttttctctttgttaaagagatcattctgcatctctatcagttcggtcggtgacagct

SEQ ID NO: 69215 - DNA, 110 bp, synthetic construct
  source 1..110: mol_type = other DNA
cccaccagccccagccaaacttgaagtcctcagatgattgcagctctggcagacgtcttgattgcaacctcctgagagctgctgagcccgaagcaccagctaaaaccatg

SEQ ID NO: 69216 - DNA, 110 bp, synthetic construct
  source 1..110: mol_type = other DNA
atgcccacctgtgttttcttttccccaagctctccctcttatatttcttctatccatcctccataactcatcctcaccaagaaaagctcctaaattttaggtctcaggtt

SEQ ID NO: 69217 - DNA, 110 bp, synthetic construct
  source 1..110: mol_type = other DNA
caccacaagagagatctgcctcaaataggttctcccatcccaggctcttagcttttgcttttccctcttcatggtacactctcgtcctagatatttgcaaacttcagtcc

SEQ ID NO: 69218 - DNA, 110 bp, synthetic construct
  source 1..110: mol_type = other DNA
tgcttttccctcttcatggtacactctcgtcctagatatttgcaaacttcagtccttcacttctttacattttacttgaatggcatcgaatcaacagtccccctcagaat

SEQ ID NO: 69219 - DNA, 110 bp, synthetic construct
  source 1..110: mol_type = other DNA
ttatcagtgttttggtgttattagaggccaattttatggaatgatttacatggaaataaaatatggctttaacttcaaaagtgtttaattctcttagccacatcctcatg

SEQ ID NO: 69220 - DNA, 110 bp, synthetic construct
  source 1..110: mol_type = other DNA
aattcaggaggacagagacagaggtagcctgtacccacacagatggcatgagaggttttgcccccatcttgcaggaactttgttatatacacacccacacataaagacac

SEQ ID NO: 69221 - DNA, 110 bp, synthetic construct
  source 1..110: mol_type = other DNA
cccaaattgtattctttataataaaccaatcagagtaaataaagtgctttcctatgttctgagagcttttctagtcaattaccaaacctggagagaatgtcacgggaacc

SEQ ID NO: 69222 - DNA, 110 bp, synthetic construct
  source 1..110: mol_type = other DNA
actttagactagagtagtagcaatgggaacaaaaagaaatgagcttttaaatctagaaatctgatggacttgaaatctaattggatgtggggaaataaaggaaagtgatg

SEQ ID NO: 69223 - DNA, 110 bp, synthetic construct
  source 1..110: mol_type = other DNA
attgtatatattaaaagtacattggaaaactgttttataccacaacttcttaaagtcgaccaggcctggattattttttctgtgttgtctccctttaaagatgttatctt

SEQ ID NO: 69224 - DNA, 110 bp, synthetic construct
  source 1..110: mol_type = other DNA
tcgaccaggcctggattattttttctgtgttgtctccctttaaagatgttatcttattaggtccaatttaaatgtttctaaatcatgacataaattactaaatctcaaag

SEQ ID NO: 69225 - DNA, 110 bp, synthetic construct; identical to SEQ ID NO: 69223
  source 1..110: mol_type = other DNA

SEQ ID NO: 69226 - DNA, 110 bp, synthetic construct; identical to SEQ ID NO: 69224
  source 1..110: mol_type = other DNA

SEQ ID NO: 69227 - DNA, 110 bp, synthetic construct
  source 1..110: mol_type = other DNA
acactgtatgatgatgtatgaattaatttgaatttcctttcatcagccatataatggacttcatgaaatgtaaagttgctagaaaaatagggcactttatggatatttga

SEQ ID NO: 69228 - DNA, 110 bp, synthetic construct
  source 1..110: mol_type = other DNA
atgattctgtggaccatttcatgggctgctgaaagaactacacatgcaagaaatgtttgatgttgagctactgccatgctatggttcctgtttgataaccttctgaacag

SEQ ID NO: 69229 - DNA, 110 bp, synthetic construct
  source 1..110: mol_type = other DNA
tacggcacactggcaatatccactgaacggtttctaacatcacctagaaaaaggccaccatgttatttttgcataaaatctccaacaaatgctaaacactatcagcttct

SEQ ID NO: 69230 - DNA, 110 bp, synthetic construct
  source 1..110: mol_type = other DNA
caccatgttatttttgcataaaatctccaacaaatgctaaacactatcagcttctaatttgttcaagtgtttcacctgcatgtacactgtgatattatagatttctcaaa

SEQ ID NO: 69231 - DNA, 110 bp, synthetic construct
  source 1..110: mol_type = other DNA
gtcttctcatacttaactcattttgtaggtctgcagaatgacttcacagcagaagaaaactaaaaaacggcaccaaagaactgaaaactgatgcacttccgttttctttc

SEQ ID NO: 69232 - DNA, 110 bp, synthetic construct
  source 1..110: mol_type = other DNA
ccccacagcaggaaacagatgttttgaaggtccaaggatagatgctatctgatctgtctcatatgcacaaaatcagtgaaaactgaggtggttcctgaaatgatagttgg

SEQ ID NO: 69233 - DNA, 110 bp, synthetic construct
  source 1..110: mol_type = other DNA
gtctcatatgcacaaaatcagtgaaaactgaggtggttcctgaaatgatagttggggccacaaggtttgagagtggtgtccatgagccatctaaaatgtgcctcttctac

SEQ ID NO: 69234 - DNA, 110 bp, synthetic construct
  source 1..110: mol_type = other DNA
caaagggctcaaaagatatcttttaattaatctgttggagtattttgtcccaaattgatcatcgagctcatcaatccatcatgttcacaaactattcaggtttttttgtg

SEQ ID NO: 69235 - DNA, 110 bp, synthetic construct
  source 1..110: mol_type = other DNA
tgatcatcgagctcatcaatccatcatgttcacaaactattcaggtttttttgtgtttttttgttttgttttgttttttgtctttttgtctttttagggccacacacttg

SEQ ID NO: 69236 - DNA, 110 bp, synthetic construct
  source 1..110: mol_type = other DNA
tagtcacatcttggaaggaaatgagaacatgcagtggtgaaagggcaagagagggctagagggaggaagagtaaaggtccaagtaggtccgacctgagaattccagccaa

SEQ ID NO: 69237 - DNA, 110 bp, synthetic construct
  source 1..110: mol_type = other DNA
ctagagggaggaagagtaaaggtccaagtaggtccgacctgagaattccagccaaaaactgagccctaattaggagtggaaggtgctgggtgaattgtagcacccttcct

SEQ ID NO: 69238 - DNA, 110 bp, synthetic construct
  source 1..110: mol_type = other DNA
caagtcctcatggatcctagttgggttcgttaaccactgagtcaccaggggaactcctaagtcatcaaatcttgataaggacactggaagagagctcgagggtaaaagta

SEQ ID NO: 69239 - DNA, 110 bp, synthetic construct
  source 1..110: mol_type = other DNA
cctaagtcatcaaatcttgataaggacactggaagagagctcgagggtaaaagtattgatgagtcatgttttcatggaaagtttgtaataaaaattgatcttaattaatt

SEQ ID NO: 69240 - DNA, 110 bp, synthetic construct
  source 1..110: mol_type = other DNA
cctctggcggagagtccagaattgcaagacttggaatcgaatcaccactgccgttagttcccctctagcatgatcccccagctctgagcaggattttgcagtaggattca

SEQ ID NO: 69241 - DNA, 110 bp, synthetic construct
  source 1..110: mol_type = other DNA
ctttgtgcaaagcaaatttctttttacccttttggctatttttgtcccagaaaggaatctatttaaaggttggccattgtagatgattactatgaaataacctgtctaaa

SEQ ID NO: 69242 - DNA, 110 bp, synthetic construct
  source 1..110: mol_type = other DNA
cacgtgcagtagtagaattaaaaaataaataaataaaatgtagatttttcttctgtactctggacagaacacgcttgtaattttctcactttctaggagtccctgtaaag

SEQ ID NO: 69243 - DNA, 110 bp, synthetic construct
  source 1..110: mol_type = other DNA
tgtggaggagaggttaatatggtcatgaagcattggagaaataaaactgtcatggctttattaaaggctataattcatgcacgagcttgcatggtaacaataaaacaatt

SEQ ID NO: 69244 - DNA, 110 bp, synthetic construct
  source 1..110: mol_type = other DNA
tgaagcattggagaaataaaactgtcatggctttattaaaggctataattcatgcacgagcttgcatggtaacaataaaacaattttaaagaaataaataaaaggactgg

SEQ ID NO: 69245 - DNA, 110 bp, synthetic construct
  source 1..110: mol_type = other DNA
actcctctttccagtcaacagctagttcagtcagtcggctgaggtgttaacagcagccactttgcttatcgggggctgccttctgttgctcctggcacagtccaaggaga

SEQ ID NO: 69246 - DNA, 110 bp, synthetic construct
  source 1..110: mol_type = other DNA
acctctgctcttgtgtttggaataagagcatttcctctttatagccttccatagtcacttcagtggtaaaaaccaaatgactgatgtgcaatgtagaaccagacatctgt

SEQ ID NO: 69247 - DNA, 110 bp, synthetic construct
  source 1..110: mol_type = other DNA
gaggtccttaacggcatcacagattttttgcaaccattgaaggccatcccaaaggacattctttgcattttcaaaacccatttagaaatcaacaggttttctctaaggaa

SEQ ID NO: 69248 - DNA, 110 bp, synthetic construct
  source 1..110: mol_type = other DNA
atttggagagatggccctaaaaactagctacaaaatccattggctttccaaaaccatttagagcctggatactcaaagcatggccaggagactggcaacgtgggccttcc

SEQ ID NO: 69249 - DNA, 110 bp, synthetic construct
  source 1..110: mol_type = other DNA
ctggccattctgcccttggatggagttaatcccagaggactccagagctggcagggcttctctgaagcaaggttctcggagctccggaggagaagagttttcctgcagtg

SEQ ID NO: 69250 - DNA, 110 bp, synthetic construct
  source 1..110: mol_type = other DNA
gcttctctgaagcaaggttctcggagctccggaggagaagagttttcctgcagtgctgaactcagagctcagcagtttttcaaatgagagctgttttgctacttctaact

SEQ ID NO: 69251 - DNA, 110 bp, synthetic construct
  source 1..110: mol_type = other DNA
cttcaatctgaaggatttgaataatttgctgctatttcctaccatcaacatgggacgtaagacttccagaaaaggacaaaatatgtgtaccattaaaatcaatcagccca

SEQ ID NO: 69252 - DNA, 110 bp, synthetic construct
  source 1..110: mol_type = other DNA
cgtaagacttccagaaaaggacaaaatatgtgtaccattaaaatcaatcagcccagagcaaaggatgttctacgagacagagaagaaattgttttatttgcagtttggat

SEQ ID NO: 69253 - DNA, 110 bp, synthetic construct
  source 1..110: mol_type = other DNA
tctttcagaacaaaacagagttttggataatgtttgtcctccagaggaaagctcagtaggccagagtgtagcgtattgttttttgattgtctagtgttccatttgtagcc

SEQ ID NO: 69254 - DNA, 110 bp, synthetic construct
  source 1..110: mol_type = other DNA
tgtgtcgaaatgctagactatttctaagcctgttcttaacttccttgctctccaacgtgttcctctgctttatgagattgttacaaacattatggcaaccatttttctcc

SEQ ID NO: 69255 - DNA, 110 bp, synthetic construct
  source 1..110: mol_type = other DNA
ggtgtcagggctggtgagttcagtttgctgttcaagatcctgtgtgtgaatgctagcatgcgtagagggatgctcatgtgagctgaacatgtggtgaaacttgatgccat

SEQ ID NO: 69256 - DNA, 110 bp, synthetic construct
  source 1..110: mol_type = other DNA
tggctcagcagtaacaaacatgactagcaagcactggcctctctcagtgggtcaagtattcagtgttactgtgagctctggtgtaggttacagacatgtcttgtatccag

SEQ ID NO: 69257 - DNA, 110 bp, synthetic construct
  source 1..110: mol_type = other DNA
ggcctctctcagtgggtcaagtattcagtgttactgtgagctctggtgtaggttacagacatgtcttgtatccagcactgctgtgactatagcataggctatcagctaca

SEQ ID NO: 69258 - DNA, 110 bp, synthetic construct
  source 1..110: mol_type = other DNA
aagagaaatagcatctcctgtagcaaaatgaatggtaaccatggcaaccatagccagaatcagagcttgacccatatggccacaaccatagccagatccctagccatacc

SEQ ID NO: 69259 - DNA, 110 bp, synthetic construct
  source 1..110: mol_type = other DNA
atccaacacctggtgaccacttgcatcagatgtgatgacgaaggtgcccatgtcttcccttcttctctccgcctcttggagacgaaatttgagagggggcagctgtgggg

SEQ ID NO: 69260 - DNA, 110 bp, synthetic construct
  source 1..110: mol_type = other DNA
tcccttcttctctccgcctcttggagacgaaatttgagagggggcagctgtggggaggggcgcgctctccacaagcagcctcagcctctgccagcaagtcaaggggtgta

SEQ ID NO: 69261 - DNA, 110 bp, synthetic construct
  source 1..110: mol_type = other DNA
acttagttattaacaaatatccagaagctttttggatctccttagtttttgctaatgtcccatttctcttctaggatctcatgttacattttgttgtcatgtctccttag

SEQ ID NO: 69262 - DNA, 110 bp, synthetic construct; identical to SEQ ID NO: 69261
  source 1..110: mol_type = other DNA

SEQ ID NO: 69263 - DNA, 110 bp, synthetic construct
  source 1..110: mol_type = other DNA
ttgaacctgcatcctcatggatactagtggattcatttccgctgcaccacaatgggaatttccggaagggagaatgctttgacgttcaacgtgcatcaccataaatagcc

SEQ ID NO: 69264 - DNA, 110 bp, synthetic construct
  source 1..110: mol_type = other DNA
gaatttccggaagggagaatgctttgacgttcaacgtgcatcaccataaatagcccagatctatcaaggatggcccaaagttccagtaaaactgagtgtggatgggagga

SEQ ID NO: 69265 - DNA, 110 bp, synthetic construct
  source 1..110: mol_type = other DNA
taactgtccagtggccatttccatctgtcaaatgttaataatatccatgtataactgaatcactctgttgaacagcagaaatagccacagccctgtaaatcaacgacact

SEQ ID NO: 69266 - DNA, 110 bp, synthetic construct
  source 1..110: mol_type = other DNA
tgtcaaatgttaataatatccatgtataactgaatcactctgttgaacagcagaaatagccacagccctgtaaatcaacgacacttcaataaaacgaaaaaattttttaa

SEQ ID NO: 69267 - DNA, 110 bp, synthetic construct
  source 1..110: mol_type = other DNA
caatgttcctctactatgatttccattagggctcagacctcttaagcaacttccccaataaacaaatcattttcatcaccacaatgactactgctacattacttgtgaca

SEQ ID NO: 69268 - DNA, 110 bp, synthetic construct
  source 1..110: mol_type = other DNA
caataaacaaatcattttcatcaccacaatgactactgctacattacttgtgacaaattctaaaccttagccctcttttaccattaaccagtctgtgtaatacaggaaaa

SEQ ID NO: 69269 - DNA, 110 bp, synthetic construct
  source 1..110: mol_type = other DNA
gaagtggaaatctgcctacaagtcaagggaactacaaaggtaattgacgacccgagaaggaagttttacctgatgtgccttttgtgtcagtggctcattctgcgcctgaa

SEQ ID NO: 69270 - DNA, 110 bp, synthetic construct
  source 1..110: mol_type = other DNA
aaaagcaaaatgaataaaaaaatagtacctgccccgtaaaattgttgggagaattaaaggaatgaacgtatgtaacgcatttacaacagtggcaggtatagagaaaatgc

SEQ ID NO: 69271 - DNA, 110 bp, synthetic construct
  source 1..110: mol_type = other DNA
aaaggaatgaacgtatgtaacgcatttacaacagtggcaggtatagagaaaatgctccctgtggattagccattcgtgccatcaccagcatctccagtatcaccagcagc

SEQ ID NO: 69272 - DNA, 110 bp, synthetic construct
  source 1..110: mol_type = other DNA
ctctggagggaaggtgctttatggctattgtactcccacccgatctgttaccctgagatgcttttttccgagatcgggaatgagctttttgtcatagtgggccattaaat

SEQ ID NO: 69273 - DNA, 110 bp, synthetic construct
  source 1..110: mol_type = other DNA
agaataaaaaatgtccatatggtatcatcactactttggaaaatctctatctaagactagaaagaaacatacaatgatgatgacagagattcctttgtcttggttttaat

SEQ ID NO: 69274 - DNA, 110 bp, synthetic construct
  source 1..110: mol_type = other DNA
tgaatttcctcgatcctgggccaagccacaagctgtgggtttggagccaccatacagtcctcccagaggggggacctggcgcccttctctggggcctggcccacgtaccc

SEQ ID NO: 69275 - DNA, 110 bp, synthetic construct
  source 1..110: mol_type = other DNA
atgcccttcacccgtagcaactctcccctcttagaagcacaagcaggtctgtccctagcctttgtggggtccaggccactggtcaacttttagcctttgtattctaaacc

SEQ ID NO: 69276 - DNA, 110 bp, synthetic construct
  source 1..110: mol_type = other DNA
ccacggtgtagacgagtgacaggaagagagctgtaagtctcggctttcgaggaaacacgggggccttgtgatgtgggcacagcacggtcatcagcacggatgctgcctgt

SEQ ID NO: 69277 - DNA, 110 bp, synthetic construct
  source 1..110: mol_type = other DNA
ttattccaaaaaaggttcacatgacaatttaggtctcctaaccaaaattcctactgttccaggctgcctacaaatacaacatcgacatatcttttttctctattatgctg

SEQ ID NO: 69278 - DNA, 110 bp, synthetic construct
  source 1..110: mol_type = other DNA
gttccaggctgcctacaaatacaacatcgacatatcttttttctctattatgctgaatactctacttactcctcctcacccaaagatccaacaaattttaaaataccatc

SEQ ID NO: 69279 - DNA, 110 bp, synthetic construct
  source 1..110: mol_type = other DNA
ttggaatcttggatgtatccctcaaagtgagacatgtccccacgcgcttggaggttttttttctttttctttttatagggcctcacctgcagcataatggaagttctcag

SEQ ID NO: 69280 - DNA, 110 bp, synthetic construct
  source 1..110: mol_type = other DNA
tatccctcaaagtgagacatgtccccacgcgcttggaggttttttttctttttctttttatagggcctcacctgcagcataatggaagttctcaggctaggggtcaaatc

SEQ ID NO: 69281 - DNA, 110 bp, synthetic construct
  source 1..110: mol_type = other DNA
ccggtgctggctggctgccatcaagagggacaggagtgagatattagggactgcggttgggacagaaggcagacctcacgcagctggcacctttaggacaccaggtgtcc

SEQ ID NO: 69282 - DNA, 110 bp, synthetic construct
  source 1..110: mol_type = other DNA
tagaagtgacttaaaaataggattttgatgtataaacgctaaaattcagctcctggggactccaattttctataaaaattggggtcaacggctttcagacttgactggga

SEQ ID NO: 69283 - DNA, 110 bp, synthetic construct
  source 1..110: mol_type = other DNA
aacttttcaaacatgaggagctacaatgaggtttgctccatttcatttaaatactgtgaggagtagttctgattcaaactaaatacgaagcaaaatcagaccagtctcac

SEQ ID NO: 69284 - DNA, 110 bp, synthetic construct
  source 1..110: mol_type = other DNA
tatgttcttggacaagctaaattctctgaatactgttccccagctcgtcctcacagggttgctgaggatctaaggagccgtcacccacatttaacactcggagaacttta

SEQ ID NO: 69285 - DNA, 110 bp, synthetic construct
  source 1..110: mol_type = other DNA
gggttgctgaggatctaaggagccgtcacccacatttaacactcggagaactttacttttcttcctgcccattcttcacttactctctgctcatccttttttctcttcat

SEQ ID NO: 69286 - DNA, 110 bp, synthetic construct
  source 1..110: mol_type = other DNA
actctttcccagattcctgactctgtgtctcctgaattgtaattcttaagacccagagtaaatgcttttcttatttgcagcttctttcgtcatcatgatcattggcatca

SEQ ID NO: 69287 - DNA, 110 bp, synthetic construct
  source 1..110: mol_type = other DNA
gagtaaatgcttttcttatttgcagcttctttcgtcatcatgatcattggcatcattcgtcgacactaactttagggggaagattgggccagtgacatatttctgtgggt

SEQ ID NO: 69288 - DNA, 110 bp, synthetic construct
  source 1..110: mol_type = other DNA
cccctggacccatggtgagatgagcaaaagtcataccccagaagccagacctctctccaaagacctttgaatactgcaagggtgcaacattgtagcctgcatattgcacc

SEQ ID NO: 69289 - DNA, 110 bp, synthetic construct
  source 1..110: mol_type = other DNA
tccaaagacctttgaatactgcaagggtgcaacattgtagcctgcatattgcacctgaaccttttctccagaaccctgggggcaaagctgtgcctcctctggggaaggaa

SEQ ID NO: 69290 - DNA, 110 bp, synthetic construct
  source 1..110: mol_type = other DNA
ataaaaatagaagttctaatgattccttctagcatcccagtaggtaatagactgatgcactcgtgggaggtgtgtacttttcctggagtccactgcctcttagttttgtc

SEQ ID NO: 69291 - DNA, 110 bp, synthetic construct
  source 1..110: mol_type = other DNA
tgcactcgtgggaggtgtgtacttttcctggagtccactgcctcttagttttgtctttcctcctcttttccaaagatcattcagcccagagttcctgtcacggctcagtg

SEQ ID NO: 69292 - DNA, 110 bp, synthetic construct
  source 1..110: mol_type = other DNA
tctggccatcgtggaaaatttagtagctgacaatgtaaggattggacgagccactgtacatgcccgtgggttttccgtaaacagtgttttggggtttaggttaacctttc

SEQ ID NO: 69293 - DNA, 110 bp, synthetic construct
  source 1..110: mol_type = other DNA
tggcaagtgatgatgaggaagctttgagcaggtcctatgcagcttcatacaacaccccgcctcggagctcccccggcggcacagaccgaggaagatgtgagaaggccacc

SEQ ID NO: 69294 - DNA, 110 bp, synthetic construct
  source 1..110: mol_type = other DNA
cccggacgggaaagatcattgtcacatataacataattcagcttgtgtaacagaagaagccgtgggaaagcaaggcaggagacgctaacacgcaagtgtattaatatctg

SEQ ID NO: 69295 - DNA, 110 bp, synthetic construct
  source 1..110: mol_type = other DNA
gaagccgtgggaaagcaaggcaggagacgctaacacgcaagtgtattaatatctgtgctaatggagcactataaaaacatttcgcctgaagagccaaaataagcttccaa

SEQ ID NO: 69296 - DNA, 110 bp, synthetic construct
  source 1..110: mol_type = other DNA
attgttctgaataagatttggctgatgacacaggccgaggcaccactcagcataacaagcttccttttagggaagttatgaagggacagtaagcaagctggcatttgggc

SEQ ID NO: 69297 - DNA, 110 bp, synthetic construct
  source 1..110: mol_type = other DNA
ctttactctcacatagaacacatcacttttgacacttccggtcaccaaatatatggggtttgcccccaaaccaagaacttccaccacaccagctgagtgtcctaccattt

SEQ ID NO: 69298 - DNA, 110 bp, synthetic construct
  source 1..110: mol_type = other DNA
gggtttgcccccaaaccaagaacttccaccacaccagctgagtgtcctaccatttcacccagtcctgacactgttgactggagggggtgttggaccctacaggttaaggg

SEQ ID NO: 69299 - DNA, 110 bp, synthetic construct
  source 1..110: mol_type = other DNA
ttcaatattgctgatttgggaggacctaacattctcggtcgacaaggaagagatgggctgcctcgtttctctcccacgtcgctgtaatagcctttctccctgtggctctg

SEQ ID NO: 69300 - DNA, 110 bp, synthetic construct
  source 1..110: mol_type = other DNA
caactcagcaatgccaagagacacgtcaaggtcacaccatccataagtgacaaatttcagcacttgaaattggatctgcttctccatgctgctgtttcgtttgaaaaaac

SEQ ID NO: 69301 - DNA, 110 bp, synthetic construct
  source 1..110: mol_type = other DNA
ttcagcacttgaaattggatctgcttctccatgctgctgtttcgtttgaaaaaactctgatatccattctttcaatgtgttcgttttcgctgctgccactctagactagg

SEQ ID NO: 69302 - DNA, 110 bp, synthetic construct
  source 1..110: mol_type = other DNA
ggttatagagcccataagtgtgagatcactcgagactgccttctaacctctaagtggacttggtcctgagggatggatagaatttcactgcattttctcatttcatttgt

SEQ ID NO: 69303 - DNA, 110 bp, synthetic construct
  source 1..110: mol_type = other DNA
gtaatgaaaggatagaacctgattatagggttgaagagtcactttagctgctgtaaagggaatggactttgggggtcaagagtagacttcgagaactttgggagaaagtg

SEQ ID NO: 69304 - DNA, 110 bp, synthetic construct
  source 1..110: mol_type = other DNA
ggtgttaactattctctgaatgtttgagagaatttgcctgtacagccatcttgtgcaggactgttattttttagaggttttttaaaatcatattttcaattttagtacta

SEQ ID NO: 69305 - DNA, 110 bp, synthetic construct
  source 1..110: mol_type = other DNA
gacaacggcattgcagaaataagggataattctgttttccttttggagatcagcaaagtatggaaaagctcaaggtttcattaacttaggggaccaggacaatgcagctg

SEQ ID NO: 69306 - DNA, 110 bp, synthetic construct
  source 1..110: mol_type = other DNA
gtgggctgacaggcagtttctagaaggaagtggtcagcggcatggtcctcttgaggtgaatgaggaagcagagcccaccgacattggccacttgaagcttgtgttggcct

SEQ ID NO: 69307 - DNA, 110 bp, synthetic construct
  source 1..110: mol_type = other DNA
gtgaatgaggaagcagagcccaccgacattggccacttgaagcttgtgttggccttgagaagcccggagtgagctcagagtgatcagaaagccaatttggcgacatcgtg

SEQ ID NO: 69308 - DNA, 110 bp, synthetic construct
  source 1..110: mol_type = other DNA
acgcagtggtgcttgtttgttttggtcaccgcttaggagtggggaaaagtatatatccatttggactgttgagtttacggactgtcctgtgtttctggaaaattgaaatg

SEQ ID NO: 69309 - DNA, 110 bp, synthetic construct
  source 1..110: mol_type = other DNA
acagctgaggtccatggagggtgatagatctggtgggggcagagtcactgtggtgggcagggctgtccaggcacgaattttctccatgtaaccacctcagaggcctggag

SEQ ID NO: 69310 - DNA, 110 bp, synthetic construct
  source 1..110: mol_type = other DNA
tgaccaaacctgagtcccaagctcatccctgactcagtccttttcaagggagataggctgaccttaaacagcacaaactgggtttactcctctgctgcagacaggttact

SEQ ID NO: 69311 - DNA, 110 bp, synthetic construct
  source 1..110: mol_type = other DNA
aaatgtgttgtgggctaaagttatgcttttttggaggcccctgatgtcaggattccgccttgtatctccgtcaagctggtaggactttaaaacaaacaaaaagtttctga

SEQ ID NO: 69312 - DNA, 110 bp, synthetic construct
  source 1..110: mol_type = other DNA
atcgggacacatgaggctggaagagagacactcagcagaataaaaccaggagaccaagagtagctgagtcccacagggctggctctttgctcactggggcaggcatggcc

SEQ ID NO: 69313 - DNA, 110 bp, synthetic construct
  source 1..110: mol_type = other DNA
aagagtagctgagtcccacagggctggctctttgctcactggggcaggcatggccccgagccccatctcagtgatagggatggagcaggcacaggtggtggtagaagtcc

SEQ ID NO: 69314 - DNA, 110 bp, synthetic construct
  source 1..110: mol_type = other DNA
cagaaattaactcttgatgagtgcagacaggggcccagctggtcctctcgagtcctcccaagtagataaatgaagtgtaataagtatgctgctgactgccaaggcaagag

SEQ ID NO: 69315 - DNA, 110 bp, synthetic construct
  source 1..110: mol_type = other DNA
gtccatgctcttaaccactatgccacatcgcctctctggttaaaaaaaaatagaaaataaaggtaataccagtgtcataagcgtggtacagttggtgtagggaatgatgt

SEQ ID NO: 69316 - DNA, 110 bp, synthetic construct
  source 1..110: mol_type = other DNA
aataaaggtaataccagtgtcataagcgtggtacagttggtgtagggaatgatgttgatgagatatgccaggctatgaatgaccagcatgatgtcacagtggctcggtct

SEQ ID NO: 69317 - DNA, 110 bp, synthetic construct
  source 1..110: mol_type = other DNA
cccagtaaaatttttgggtactggtgaggtgagggcctaacggagggagaagagtgtcttgaggggttattttcagcttcactgcgtgagagttgtagcagtggattatt

SEQ ID NO: 69318 - DNA, 110 bp, synthetic construct
  source 1..110: mol_type = other DNA
gtcttgaggggttattttcagcttcactgcgtgagagttgtagcagtggattattgtgatgacgtgtgtagtttattttatcttctgcgtactcttaattttttttttta

SEQ ID NO: 69319 - DNA, 110 bp, synthetic construct
  source 1..110: mol_type = other DNA
aatattaagggagaatgaaaacagcttgtaagttccagtaacactgttcttgtcattgttgagtatgtatctttagtttatctaaaatgagagtttggagttcccactgt

SEQ ID NO: 69320 - DNA, 110 bp, synthetic construct
  source 1..110: mol_type = other DNA
cgtctgcctaacctcaaagctgggaatctaactgaagggtcatctgactttgccattaagaaaatggatgtgacaattgaggtggtgttggcaccatgccatgtgaccac

SEQ ID NO: 69321 - DNA, 110 bp, synthetic construct
  source 1..110: mol_type = other DNA
ttaagaaaatggatgtgacaattgaggtggtgttggcaccatgccatgtgaccaccgggcctcgccttcatcagccctgcaagccacatctcagtgctgcaggatgtttc

SEQ ID NO: 69322 - DNA, 110 bp, synthetic construct
  source 1..110: mol_type = other DNA
ttaagacagccactcaatttgtcaggattagtttagcttaaatgagctaataccgtccctaaatcccctagccaggtgtgtaaatgcggtatgctgtagcccatggaatc

SEQ ID NO: 69323 - DNA, 110 bp, synthetic construct
  source 1..110: mol_type = other DNA
gggaagctgtgagaagggaattgggagctggagcagagcaggggcagcagagaaggaaaggaagatgcaagaagatccgagcagggagggcctctgggctcccacagtgg

SEQ ID NO: 69324 - DNA, 110 bp, synthetic construct
  source 1..110: mol_type = other DNA
aagagggaccaattctgtgatgctgttcacgcccagagccccccagaaatcaggccgaagcaaggttccagctaagaccccaagcgtctttaattctcccctgccctatg

SEQ ID NO: 69325 - DNA, 110 bp, synthetic construct
  source 1..110: mol_type = other DNA
cacagatataggagcaaaaagaggggaagctgatgtgacctgtaggaatccgacccctccctatccccctgcagccaaggccatgtctgctttcacaccccgcacttgag

SEQ ID NO: 69326 - DNA, 110 bp, synthetic construct
  source 1..110: mol_type = other DNA
agccacctatgacagcatcttgctgtcctgcatccaaggcaaaggaaggagcttggagtagcccttctagcgagtgttttcccagctcgggttcagacccaagccttctg

SEQ ID NO: 69327 - DNA, 110 bp, synthetic construct
  source 1..110: mol_type = other DNA
gttttccaccacctccaatttctaggttactgtctgatgacctcagccaggcttcagccctggatctgaagcactagacccgcaggttctagaatcaaggcgctaatgac

SEQ ID NO: 69328 - DNA, 110 bp, synthetic construct
  source 1..110: mol_type = other DNA
agccctggatctgaagcactagacccgcaggttctagaatcaaggcgctaatgacaccacatcttcagaaaggccaatgccggtggcagtgtggtctagacagggaccct

SEQ ID NO: 69329 - DNA, 110 bp, synthetic construct; identical to SEQ ID NO: 69327
  source 1..110: mol_type = other DNA

SEQ ID NO: 69330 - DNA, 110 bp, synthetic construct; identical to SEQ ID NO: 69328
  source 1..110: mol_type = other DNA

SEQ ID NO: 69331 - DNA, 110 bp, synthetic construct
  source 1..110: mol_type = other DNA
catacttatttgcccatctagaaattttgtttttggtttctttaaactagagctgaaatggaaggccacttgcaaagcactccaggaccataaatctctttggatttcgt

SEQ ID NO: 69332 - DNA, 110 bp, synthetic construct
  source 1..110: mol_type = other DNA
aaatggaaggccacttgcaaagcactccaggaccataaatctctttggatttcgtgagtcttccctgccacccaaaccctttgacatttcatttgatgacagattttgtt

SEQ ID NO: 69333 - DNA, 110 bp, synthetic construct
  source 1..110: mol_type = other DNA
ttcagagcacaggtgccagaaaccttgggacgggcatggtctgaagccattgcttttaagagaacctgggctttctggccaaggggtaagttatctacgagggtaggacg

SEQ ID NO: 69334 - DNA, 110 bp, synthetic construct
  source 1..110: mol_type = other DNA
agcaaaccctgtgaggattttcagctcctatttgaaatactgggctaatgcgattagagaaagtaggagcaatttaatgaaaacacatgcgtaggaagaggtagtaacat

SEQ ID NO: 69335 - DNA, 110 bp, synthetic construct
  source 1..110: mol_type = other DNA
cttagaccacagacgtctttccctcactctcgaggatgataaaaatcccttcctaatgtttaaatggagaacctgtgctttcaccctcagatcagggcggacacggcctt

SEQ ID NO: 69336 - DNA, 110 bp, synthetic construct
  source 1..110: mol_type = other DNA
atgtttaaatggagaacctgtgctttcaccctcagatcagggcggacacggccttcgatacgctgtgcgtttaatttatggagaagacagatgtcatcctgactcttgct

SEQ ID NO: 69337 - DNA, 110 bp, synthetic construct
  source 1..110: mol_type = other DNA
ttaagggagcacctccacacttgctgcagaaattattatagagctccctcggccacctggtgccgaagacaataatcaaagtcacatcctccccacctgtcattagatta

SEQ ID NO: 69338 - DNA, 110 bp, synthetic construct
  source 1..110: mol_type = other DNA
tgtaaattgtatctcaataaagatgcttaaaaaatgagtcaaggagttccagttgtggctcagtgtaatgaagtatccatgaagattcgggtttgatcactggccctgct

SEQ ID NO: 69339 - DNA, 110 bp, synthetic construct
  source 1..110: mol_type = other DNA
gagtcaaggagttccagttgtggctcagtgtaatgaagtatccatgaagattcgggtttgatcactggccctgctcagtgggttaagggtctggcattgcggtgagctgt

SEQ ID NO: 69340 - DNA, 110 bp, synthetic construct
  source 1..110: mol_type = other DNA
gaaacccccccatgaggacatgacagaatcatctggaaagaactgtggcagagaccagctaaaccatctaccaagctatgccgctttccttctagatatgcagctggtcc

SEQ ID NO: 69341 - DNA, 110 bp, synthetic construct
  source 1..110: mol_type = other DNA
cagctaaaccatctaccaagctatgccgctttccttctagatatgcagctggtccaggtttcccagcttctcctcctgcgatgtgcccccagctcagatgtgttagaagc

SEQ ID NO: 69342 - DNA, 110 bp, synthetic construct
  source 1..110: mol_type = other DNA
aacaggtaaatttctgaagctgctcgttttgactctggcccccagcccccgcttcgggaagagggcacattctggaggggaaatgaccggtctgggagctgtcttcccaa

SEQ ID NO: 69343 - DNA, 110 bp, synthetic construct
  source 1..110: mol_type = other DNA
tgctggggcacctgctgggcctctggtcagtggcctggggctgcagcgtggagctctgccggcctcagggacaatccctccacctcctcctgtgaccgtctttggtcttt

SEQ ID NO: 69344 - DNA, 110 bp, synthetic construct
  source 1..110: mol_type = other DNA
ctgccggcctcagggacaatccctccacctcctcctgtgaccgtctttggtctttgctgtggggtttggttacagagccaaactggagtctgctcaggccctcgggcggt

SEQ ID NO: 69345 - DNA, 110 bp, synthetic construct; identical to SEQ ID NO: 69343
  source 1..110: mol_type = other DNA

SEQ ID NO: 69346 - DNA, 110 bp, synthetic construct; identical to SEQ ID NO: 69344
  source 1..110: mol_type = other DNA

SEQ ID NO: 69347 - DNA, 110 bp, synthetic construct
  source 1..110: mol_type = other DNA
tgggtcacaggtgaagtggttgtttggttttcaaagaaacggccacactgccaacctcggagagctcccgcttctccgcatcctcgccagcgtctggagtccccatctta

SEQ ID NO: 69348 - DNA, 110 bp, synthetic construct
  source 1..110: mol_type = other DNA
aaaacacctattgaaaaagacgaaactttaaaaattataaaaggcttatctggataactttatgcagcgaatttggaaaacccagatgaaacagaccagtttctaggaaa

SEQ ID NO: 69349 - DNA, 110 bp, synthetic construct
  source 1..110: mol_type = other DNA
aactttatgcagcgaatttggaaaacccagatgaaacagaccagtttctaggaaaatcacactttacccaaattgcttcagtagaggcataaagctcaaatcaacgaggg

SEQ ID NO: 69350 - DNA, 110 bp, synthetic construct
  source 1..110: mol_type = other DNA
gccctgtcctctggcctcacagcatcgggcaggcgtgtcttcctcctcctgccatgctgctcactgcccttgtctcatcaaatgagatggcccagtgactgcacctgctg

SEQ ID NO: 69351 - DNA, 110 bp, synthetic construct
  source 1..110: mol_type = other DNA
gggcaagacagcacaagtggtacgtttgcattcgtacagctaacttataagtagaggtgactggcagacgggctgcagatgtacttggatggatggatggggagacagat

SEQ ID NO: 69352 - DNA, 110 bp, synthetic construct
  source 1..110: mol_type = other DNA
ggtgactggcagacgggctgcagatgtacttggatggatggatggggagacagatagcctacaatcccttctttgctgaacgtgtatttatttcttgagtgataatacaa

SEQ ID NO: 69353 - DNA, 110 bp, synthetic construct
  source 1..110: mol_type = other DNA
ctaggatagctcctgtgatagaatagaaggtgtgaaggtagagattcatgcttcgttgccaacctcagagggaacgtatgatatttttcaccatcagttatgacgtcagc

SEQ ID NO: 69354 - DNA, 110 bp, synthetic construct
  source 1..110: mol_type = other DNA
ttgccaacctcagagggaacgtatgatatttttcaccatcagttatgacgtcagctatagcgctttttggtagatgccctttatcaggttgagggttggtttgttttgtt

SEQ ID NO: 69355 - DNA, 110 bp, synthetic construct
  source 1..110: mol_type = other DNA
gggggctgtggcatgtcggcccccacatcgtagatccggtctcaccacacatctccgcatcctcagtctggaagctcttagacgagccgtcaccccctgtctcctggagc

SEQ ID NO: 69356 - DNA, 110 bp, synthetic construct
  source 1..110: mol_type = other DNA
cgcatcctcagtctggaagctcttagacgagccgtcaccccctgtctcctggagcctgatttttgcctcctttccactctgtcctgcccgtagcagaaagctgagagcct

SEQ ID NO: 69357 - DNA, 110 bp, synthetic construct
  source 1..110: mol_type = other DNA
gaccattacaagaaatatgaataagactctatagagccactatggaaaacagtatggagcttcctcagaaaactaaggatattgttgccatatgatgccgcaaaaccact

SEQ ID NO: 69358 - DNA, 110 bp, synthetic construct
  source 1..110: mol_type = other DNA
ggagcttcctcagaaaactaaggatattgttgccatatgatgccgcaaaaccactcctgggtgtatatctaattcaaaacctacatgttgccgtgagctgtggtgtaggt

SEQ ID NO: 69359 - DNA, 110 bp, synthetic construct
  source 1..110: mol_type = other DNA
cctgtctgcacccgtcccactgtctctccgctgtgtgtaatcggctgctcgtctacaactgcagtcagtacactgttcatttacagagacactgtttgacccttcctcgt

SEQ ID NO: 69360 - DNA, 110 bp, synthetic construct
  source 1..110: mol_type = other DNA
caactgcagtcagtacactgttcatttacagagacactgtttgacccttcctcgtatctgcccgtcactcctaagatcccttactctccctcccgtggtaaatcccgttt

SEQ ID NO: 69361 - DNA, 110 bp, synthetic construct
  source 1..110: mol_type = other DNA
cagcgggaccctttgacattctcggcagcagtgcccagggtgccagctcctccacagcttcgcccacactctgtttttctttggtgtactgttgttgctgttgctcccaa

SEQ ID NO: 69362 - DNA, 110 bp, synthetic construct
  source 1..110: mol_type = other DNA
ttaaaaatattccatggtttggggctccgctttggcacagcagcagcttcaggtctccctttattttaatgccattaaaagaccactggctgtaagtaccccagggcccc

SEQ ID NO: 69363 - DNA, 110 bp, synthetic construct
  source 1..110: mol_type = other DNA
tcagtaacaacagcagcaaaaatctgattcaacaatgagtaaaggacttgaggagttcccatcgtggctcggtggttaatgaatccaaccaggatgcatgagttcgtggg

SEQ ID NO: 69364 - DNA, 110 bp, synthetic construct
  source 1..110: mol_type = other DNA
ctgctgctgagtgatcttctcgaggtcaccccaaagctcaaaagctgtctgccgtctacatccctggactccttgctaagagccgagacagcatcaagccctccccccgg

SEQ ID NO: 69365 - DNA, 110 bp, synthetic construct
  source 1..110: mol_type = other DNA
gaatctggtccatctacggaaccaaggagcccgggcctcacctgaatgtgcacgctccttcttaggggagagaaggtccttccctgagctcagacctcatcctcctggct

SEQ ID NO: 69366 - DNA, 110 bp, synthetic construct
  source 1..110: mol_type = other DNA
acacggaacgtgagaggatgaggaaatggaaatcgaaagaacgctggcgcagcaatactcctaccagacacaacggaccttgaagagccttgcaagagacaaggaaggac

SEQ ID NO: 69367 - DNA, 110 bp, synthetic construct
  source 1..110: mol_type = other DNA
ccaaaaaccgtacgtgagtggatgataaacccgtgaaaagatgctgggcaccactgggtttagggaaacgcaggccaaatccacagtgaggcccctcactcccagcagac

SEQ ID NO: 69368 - DNA, 110 bp, synthetic construct
  source 1..110: mol_type = other DNA
ccttacgctcatgccatgcgtgttacagggagattccccaattgcacacaccgtgaaatgacagcacaaacaccacccaccaccacagagtttcaaatgctctctcttgt

SEQ ID NO: 69369 - DNA, 110 bp, synthetic construct
  source 1..110: mol_type = other DNA
aaatgacagcacaaacaccacccaccaccacagagtttcaaatgctctctcttgtgatgagaactttgaagatctattctcagcaaccgtgtgcaacacagcatcatcaa

SEQ ID NO: 69370 - DNA, 110 bp, synthetic construct
  source 1..110: mol_type = other DNA
accagccacagcctggggactggcctcagggcagagctcccctccagaaaatctagcctgactcaggcagttctctgtccgctcacctgcttgatgtcctggagacctca

SEQ ID NO: 69371 - DNA, 110 bp, synthetic construct
  source 1..110: mol_type = other DNA
cctttctttctcagcccctgtccgagtgggttccttcttgttttgttttggaaaatacacttacttttcatgatgttgaatatttgctgatgtttttccaaatactgtgg

SEQ ID NO: 69372 - DNA, 110 bp, synthetic construct
  source 1..110: mol_type = other DNA
ccctgtccgagtgggttccttcttgttttgttttggaaaatacacttacttttcatgatgttgaatatttgctgatgtttttccaaatactgtggtgattgttttgaaat

SEQ ID NO: 69373 - DNA, 110 bp, synthetic construct
  source 1..110: mol_type = other DNA
gagagaggggaaaaagcggctgtttcggcaaaaacaggaaaacaagagcgtcaataagcacgaggccttcagggtccgcgggagctgcttgtgggggtgccggggtgacc

SEQ ID NO: 69374 - DNA, 110 bp, synthetic construct
  source 1..110: mol_type = other DNA
ttttgtgaatctatggagcatcgctgcgagttctgccttaactgccgggtggagttccctgtgctgccgcctgggtccagacatctctgcgggaagacttctcagctcag

SEQ ID NO: 69375 - DNA, 110 bp, synthetic construct
  source 1..110: mol_type = other DNA
tccctgtgctgccgcctgggtccagacatctctgcgggaagacttctcagctcagcgtgatgtcctcatgggtgctttgcgagagccgggggctccccgtgtccccgggc

SEQ ID NO: 69376 - DNA, 110 bp, synthetic construct
  source 1..110: mol_type = other DNA
cccacaggaaacctggggttctgctgccctgagaccctgaggccgtgggacccggaaaccagactctgcccacctcatacgtatcagcgctcagaggtcagagttcaggg

SEQ ID NO: 69377 - DNA, 110 bp, synthetic construct
  source 1..110: mol_type = other DNA
ctgaggggggtgacctgcagcaacgagtgagaaacaccacgaccaggagagagacagcgacgcagagactggaaggacgctttccctgctttccgaacgagggcgccaca

SEQ ID NO: 69378 - DNA, 110 bp, synthetic construct
  source 1..110: mol_type = other DNA
ggggcggtggggaaaggcaggcagggcagcgccaggaagcttggttttctcccgttttaagagctgccaccagagtcacccttggtaagtggacacgtggcgattttcgt

SEQ ID NO: 69379 - DNA, 110 bp, synthetic construct
  source 1..110: mol_type = other DNA
tgaaaactttatcatgagtaatattcacacttaagaaacaaagtagcatgaggtgtaatgagaaagcatctgtttaggagaaccggtgatagtggggtgtccgtgtccag

SEQ ID NO: 69380 - DNA, 110 bp, synthetic construct
  source 1..110: mol_type = other DNA
gcagtcgcaggcgtgtgcacgcagctcacatgatgtcacaggtgccacatctgtgttccagaccatgagcttttgtttcacgcgtgacgaacatcaacagaactaaactc

SEQ ID NO: 69381 - DNA, 110 bp, synthetic construct
  source 1..110: mol_type = other DNA
ttccagaccatgagcttttgtttcacgcgtgacgaacatcaacagaactaaactcccggcaaaggcggtccattctgtcctggtccctgggccccagacctgttgactgt

SEQ ID NO: 69382 - DNA, 110 bp, synthetic construct
  source 1..110: mol_type = other DNA
ccgcctgcacttaacagtgaaaatatttacttggagatgttggaattttaaagagcaggcctcccgacggacagcccgggaagggctggaggaggggctggaagtggtcc

SEQ ID NO: 69383 - DNA, 110 bp, synthetic construct
  source 1..110: mol_type = other DNA
gggctccttgaaaatgaaatcgtcttagattcagtttaaacagcctccgtgcacggatgagaggggctctcagagctcctgacccattttagccagaggttcacttactg

SEQ ID NO: 69384 - DNA, 110 bp, synthetic construct
  source 1..110: mol_type = other DNA
gtgcgcgcgcacacacacacacacacgcacacgtgtgccctgccgcccgctttgatctgctgtcgtgttcgcatcagcacatgtgcaaacccattttctcttcttaagct

SEQ ID NO: 69385 - DNA, 110 bp, synthetic construct
  source 1..110: mol_type = other DNA
tctgctgtcgtgttcgcatcagcacatgtgcaaacccattttctcttcttaagctcagtttgcttccttcaccgagggatgcgctttctcactgaacctttgcttccaca

SEQ ID NO: 69386 - DNA, 110 bp, synthetic construct
  source 1..110: mol_type = other DNA
atcagggagaggacgctggggacaaagccacccccagaagcttccatggggtgcaacaggtctcgttagaacggggtggtgagcagaataaggaattggaactgtgagca

SEQ ID NO: 69387 - DNA, 110 bp, synthetic construct
  source 1..110: mol_type = other DNA
acaggtctcgttagaacggggtggtgagcagaataaggaattggaactgtgagcatgtggcctcccggcgaagggactcggcagacgctgtccagcccagggtccacctc

SEQ ID NO: 69388 - DNA, 110 bp, synthetic construct
  source 1..110: mol_type = other DNA
aaaacaaacattaaaacagttgctttgttacaaaataaaagccacattccaggaagcacacagaggcctttccccgcagagcggaccaagaagggaggccccgccccagc

SEQ ID NO: 69389 - DNA, 110 bp, synthetic construct
  source 1..110: mol_type = other DNA
taaaagccacattccaggaagcacacagaggcctttccccgcagagcggaccaagaagggaggccccgccccagcgcagaggagcccccggagcccccgacgccctcccc

SEQ ID NO: 69390 - DNA, 110 bp, synthetic construct
  source 1..110: mol_type = other DNA
cggcgcggtcacgcccacccacgcgtcctgccggggagtccggggagcacggacctgcctctgcgcgttgggtcttgttacaaggctgctgcattttgcaaacctctccc

SEQ ID NO: 69391 - DNA, 110 bp, synthetic construct
  source 1..110: mol_type = other DNA
tttggggaggtttgcagtttcccaggctacgtgtaggcctgggatccactgtgagtgagttttgttaagggcatgaggtccgtgttgagagtcttcttcttccttttttt

SEQ ID NO: 69392 - DNA, 110 bp, synthetic construct
  source 1..110: mol_type = other DNA
gggtccctgttgaccaagaaattaaaccagccagtgaaaaacccatatattgggctagcttgacccagaggggccaggagctgccacacggaaggggggccaggacaagg

SEQ ID NO: 69393 - DNA, 110 bp, synthetic construct
  source 1..110: mol_type = other DNA
tatattgggctagcttgacccagaggggccaggagctgccacacggaaggggggccaggacaagggaggaaggctctgccccccagcccagggccgggacaactggggtc

SEQ ID NO: 69394 - DNA, 110 bp, synthetic construct
  source 1..110: mol_type = other DNA
ctgagtgcagtgtaagcacagcactcattttaactaaagggccgccctgggacgtgggaacgagcgtctctccctgcagggccgcctgcgctttccaatacctcccaaca

SEQ ID NO: 69395 - DNA, 110 bp, synthetic construct
  source 1..110: mol_type = other DNA
ctccgtggggcctgtggtcacgggaggactcaggcattgaccctgagaattgggaaagcgctgcggatttgagcagggggtcactgactagacttttaggatgatctttc

SEQ ID NO: 69396 - DNA, 110 bp, synthetic construct
  source 1..110: mol_type = other DNA
aagcgctgcggatttgagcagggggtcactgactagacttttaggatgatctttctgtcactgttcagggcagactgtggggggcggggaaccattggaaaggctccagg

SEQ ID NO: 69397 - DNA, 110 bp, synthetic construct
  source 1..110: mol_type = other DNA
gcaagaggccccagaggcagaacccaccatgtcaagtggcttccttccgccgctgggactgcaaaagaagaagacaaggtgagaaggctggttcagtctgtgaggagcct

SEQ ID NO: 69398 - DNA, 110 bp, synthetic construct
  source 1..110: mol_type = other DNA
gggccacggtgttttatttggaggtgggtcgaaagcgtttttattgttccgcgagtgttcttccctggaagtactgcttttttatgcttgccctgtggcggtcctgcgtc

SEQ ID NO: 69399 - DNA, 110 bp, synthetic construct
  source 1..110: mol_type = other DNA
ctgagttgggtgcttttccagggagttctgagctgctcataattatccttacgaaaataaacagtccaaagtggtgaggcttcattcggagcacagtttacggctgtctg

SEQ ID NO: 69400 - DNA, 110 bp, synthetic construct
  source 1..110: mol_type = other DNA
cctccgagggagagagctgtctgcagctgggaggtaatcggatgtgggaggaggtggacaaggagacatagaacactgcctaaatgaagggcaatcggatttgaagtaat

SEQ ID NO: 69401 - DNA, 110 bp, synthetic construct; identical to SEQ ID NO: 69400
  source 1..110: mol_type = other DNA

SEQ ID NO: 69402 - DNA, 110 bp, synthetic construct
  source 1..110: mol_type = other DNA
aaatatactactgctgtcaatgcttctgtttgggagttggaggtgcttctaaatatagttctgtgcttttctgcactttgcagactttctgcaaagagagcaggcatgtg

SEQ ID NO: 69403 - DNA, 110 bp, synthetic construct
  source 1..110: mol_type = other DNA
cagtgtgagcagatcctggaacccccaaggccgggcgcaggccaggcagcgagctttggtagggcgctgtggcctcttggcgagccaggagggggccgttagaagtactg

SEQ ID NO: 69404 - DNA, 110 bp, synthetic construct
  source 1..110: mol_type = other DNA
ttggtagggcgctgtggcctcttggcgagccaggagggggccgttagaagtactgagctgctgggaacagaaatgagcccacttccacttggtggagccccgcggcgtct

SEQ ID NO: 69405 - DNA, 110 bp, synthetic construct
  source 1..110: mol_type = other DNA
ctctctctaggcctcctgtccaggaccagctgtgccaggattggggcgcagaggtgggtgatgcttgaaagaggctctccttatgtgcaggttcacgcttgaaatgcaca

SEQ ID NO: 69406 - DNA, 110 bp, synthetic construct
  source 1..110: mol_type = other DNA
tcagactgcgacgcagtgagaagggacagccctgaaaggtctgcgctggctgccgccagcgaggtggcaggagggcccggcgcgagctggtgctgtgtgagtgtgaggag

SEQ ID NO: 69407 - DNA, 110 bp, synthetic construct
  source 1..110: mol_type = other DNA
ccagcgaggtggcaggagggcccggcgcgagctggtgctgtgtgagtgtgaggaggctggcatgcgaattctagcagcaggtggaagacgtgacctgtgtacgtacacgg

SEQ ID NO: 69408 - DNA, 110 bp, synthetic construct
  source 1..110: mol_type = other DNA
ctggaatactttagacagtcccagagaccaccacgctgagctggaaggtggtcagcagagcaccaggctcttccgtactcaggttccggctcaccctttggatctcgacc

SEQ ID NO: 69409 - DNA, 110 bp, synthetic construct
  source 1..110: mol_type = other DNA
ctccggagccagcgggtggtcgcaaaggtcacaggactcagagctaaagcagccgacctgcccctcctgcgttaggccagagtgggtctgcagaagtgagggtctgcgga

SEQ ID NO: 69410 - DNA, 110 bp, synthetic construct
  source 1..110: mol_type = other DNA
aggtgatagcgtttgcgagcgtcgcttacaggtctcgcgccgcaggcaggtacatccagtggaagctggtgagggacccagatgctctgtcctttcttcgcagctactcg

SEQ ID NO: 69411 - DNA, 110 bp, synthetic construct
  source 1..110: mol_type = other DNA
ccagtggaagctggtgagggacccagatgctctgtcctttcttcgcagctactcgcggatctgaaatcatttcagaattgtgcaacgcacgcgtgcgatgtacatgcaca

SEQ ID NO: 69412 - DNA, 110 bp, synthetic construct
  source 1..110: mol_type = other DNA
cagacaggtgtaactggggacgcagatggagtggggaggcccacactgtggacagcaccctgctgcccccatcagtgctgccgtcgcagaggtacagtgagcgggactca

SEQ ID NO: 69413 - DNA, 110 bp, synthetic construct
  source 1..110: mol_type = other DNA
caccctgctgcccccatcagtgctgccgtcgcagaggtacagtgagcgggactcagggaagcacacacacgtgcctgaactgtggccacggaaaggagcaaaccaaggag

SEQ ID NO: 69414 - DNA, 110 bp, synthetic construct
  source 1..110: mol_type = other DNA
gtcctgccttggctcactaacttattactaatgctcactttctggttagggttatattgcacctcgtgtctggctttcacaaatgcactcttccttgcttaattgctttc

SEQ ID NO: 69415 - DNA, 110 bp, synthetic construct
  source 1..110: mol_type = other DNA
tactaatgctcactttctggttagggttatattgcacctcgtgtctggctttcacaaatgcactcttccttgcttaattgctttcctttactaatggttactttctagtt

SEQ ID NO: 69416 - DNA, 110 bp, synthetic construct
  source 1..110: mol_type = other DNA
atgacctaatcacatcgggacctgacttcacttttccaggatactatggtcacacaggcctacctggtgccatattggaggggactctccaagggtgtgaaaactgggag

SEQ ID NO: 69417 - DNA, 110 bp, synthetic construct
  source 1..110: mol_type = other DNA
aggtatttttcctaagacatagtcgacaggcctatgaaaagatattcaacgtcattagtcattagggaactgccatcaaaactacagtgacaccccttcacccgtactca

SEQ ID NO: 69418 - DNA, 110 bp, synthetic construct
  source 1..110: mol_type = other DNA
tagtcattagggaactgccatcaaaactacagtgacaccccttcacccgtactcattagggtggatataatcaaaaggtcagatagaacaaatgctggcaagaaggtggg

SEQ ID NO: 69419 - DNA, 110 bp, synthetic construct
  source 1..110: mol_type = other DNA
aacagtggcgtctccattggccattagagagaaaaggcagaatggagtagctatgggtcagacatccaaggtaatactagcaaatgttatgggcataattttagacaagt

SEQ ID NO: 69420 - DNA, 110 bp, synthetic construct
  source 1..110: mol_type = other DNA
ggtcagacatccaaggtaatactagcaaatgttatgggcataattttagacaagtctttgtattgctaagaacttattgtgctccctgtcagtcttgatgccaccagctg

SEQ ID NO: 69421 - DNA, 110 bp, synthetic construct
  source 1..110: mol_type = other DNA
tcgaaacttcaaccacatggttgttagctgggttcatttccactgttcccagtatgtttatttctttatttttttaatatatattttttaatgactgtacccatggcata

SEQ ID NO: 69422 - DNA, 110 bp, synthetic construct; identical to SEQ ID NO: 69421
  source 1..110: mol_type = other DNA

SEQ ID NO: 69423 - DNA, 110 bp, synthetic construct
  source 1..110: mol_type = other DNA
attcagcctccaggtaccgcagtcaacttcgcaggaatcaaaactgttctggactcttcctctccctgtcctcccgcaaacaaccaacctgacactcaaagggcatcttc

SEQ ID NO: 69424 - DNA, 110 bp, synthetic construct
  source 1..110: mol_type = other DNA
gtctagtacttccttttcttcccttgctctgtgctgtccttggcactgaggtctgaggaaataaagttaattgcttttgggcaaagtgcattttagcttgatgttaaatt

SEQ ID NO: 69425 - DNA, 110 bp, synthetic construct
  source 1..110: mol_type = other DNA
tgaggaatcctgagtcagacacagtatgggcctgagatgcacctgggtctctggacttttgcacctgctttaacagctggctcctcctttgtcattttggagggtggcat

SEQ ID NO: 69426 - DNA, 110 bp, synthetic construct
  source 1..110: mol_type = other DNA
agaggtttagcctcagaacctggaatccatggaggagaatggctgagtctggggttttcaggggcctccccaaggagctccagagaggggaaccacacccaggctgtcag

SEQ ID NO: 69427 - DNA, 110 bp, synthetic construct
  source 1..110: mol_type = other DNA
taagcctctcccattcttttttggaataagggcagaagtgttttattcttttagctagcttttgtttgtttgtttaaagaatcagattttcttgaccactttgtgtattt

SEQ ID NO: 69428 - DNA, 110 bp, synthetic construct
  source 1..110: mol_type = other DNA
cttttaagtgtatctactaatgtcacatgtccacttggccctcccaaaggtctcccacctctcagagcctgagaacatcttttctacagctcacaacgccccacatggac

SEQ ID NO: 69429 - DNA, 110 bp, synthetic construct
  source 1..110: mol_type = other DNA
cacctctcagagcctgagaacatcttttctacagctcacaacgccccacatggaccagtcccctttaagttttcttgtcttaccgcctacaagccctttgctttgttgta

SEQ ID NO: 69430 - DNA, 110 bp, synthetic construct
  source 1..110: mol_type = other DNA
tctaccaccctcctcttcctattcttcctgccaaatatgatagttatattttgctattttattgatcaatttaaataatgtacttaaatctctatttcccattccagcaa

SEQ ID NO: 69431 - DNA, 110 bp, synthetic construct
  source 1..110: mol_type = other DNA
gcgcagactagaaagttaaaagtaagggaggctaagtacccacttttttagctggtacgtagatctgggtctgtttgtcttcaaagactcttcttcccagagcacaggac

SEQ ID NO: 69432 - DNA, 110 bp, synthetic construct
  source 1..110: mol_type = other DNA
attaatgaggatctataaaacccacctgaaaactgcagtaatacactagggccgattctatttttctcctttagggaagggaatctaattgcaaagccacctgagggcaa

SEQ ID NO: 69433 - DNA, 110 bp, synthetic construct
  source 1..110: mol_type = other DNA
gagaaaatggtaactactatagaaatattctgagcactgatccttgtggattacattttaaaagggagacaacaatgtgttcaagtgaataaggggtccaggcattgcta

SEQ ID NO: 69434 - DNA, 110 bp, synthetic construct
  source 1..110: mol_type = other DNA
cattctggaggtccttagttattcagaatggctgcttcatggctaaagagttctttttctctttctatccccttccccccccccttttggtaagaatttctggatgctag

SEQ ID NO: 69435 - DNA, 110 bp, synthetic construct
  source 1..110: mol_type = other DNA
tttctctttctatccccttccccccccccttttggtaagaatttctggatgctagttacgattttttttctttaacatacatccaagcatgaatatcatggataaataca

SEQ ID NO: 69436 - DNA, 110 bp, synthetic construct
  source 1..110: mol_type = other DNA
ggaataggtttccaaaggtggaggggaggagctgagggagcgtggggtgtaacgcagcaagaggtgggctgaagaaaggacacatgtgggagttcccgtcgtggtgtagc

SEQ ID NO: 69437 - DNA, 110 bp, synthetic construct
  source 1..110: mol_type = other DNA
cctccggcttctcaaatataaaaggcctggaagtggtagcttaagcataggatctagatggaagttatgcgaatgcacgtctggcttctactctgaactgtcaggcaggg

SEQ ID NO: 69438 - DNA, 110 bp, synthetic construct
  source 1..110: mol_type = other DNA
atgtcaccagctaacagcagggcttgagatgattctcgactcccaagaaccagaacatccttcctgcatatgtcctggattcaagaagccaagtagtaggagttcccatt

SEQ ID NO: 69439 - DNA, 110 bp, synthetic construct
  source 1..110: mol_type = other DNA
aaaaacaaggggaaggaaggaacgtagattagaggttaccaggggttgaggggggtggagaatggggcgttactgtttaatggggacagattttcattttgaggtgtgaa

SEQ ID NO: 69440 - DNA, 110 bp, synthetic construct
  source 1..110: mol_type = other DNA
gaggaggaggtgttggcagccgaggtgtatgtgtgcgtgtgcttgtgcgtgcactggggaggcggaccgtgaaacgctaccttacccattttagtggaagccagagtgaa

SEQ ID NO: 69441 - DNA, 110 bp, synthetic construct
  source 1..110: mol_type = other DNA
ggggaggcggaccgtgaaacgctaccttacccattttagtggaagccagagtgaaacgtcaccacgcaagcctgctgccagagggacgcgggtgagcgggagtcaggtcc

SEQ ID NO: 69442 - DNA, 110 bp, synthetic construct
  source 1..110: mol_type = other DNA
ggtcttccttccctttcagagctggaggaggaaacacacacctccttgttcagcagggaggggaccctgccggaggagcctggaaaccagatccaactgctcaggctctc

SEQ ID NO: 69443 - DNA, 110 bp, synthetic construct
  source 1..110: mol_type = other DNA
ccaagcttgtttcccaaggcccagaggatgctaccgtgtgtaccaggagatatctgaaatgccactgagactggtgcttcatgcagtccccagtctgacctggacagagg

SEQ ID NO: 69444 - DNA, 110 bp, synthetic construct
  source 1..110: mol_type = other DNA
ctcaaacaccccgagcaagctcatgcagctcacctacaagccaccacagggttaaggcacttgggggtgtggatcaggacagttagtttcaccagtcaattcaactgggc

SEQ ID NO: 69445 - DNA, 110 bp, synthetic construct
  source 1..110: mol_type = other DNA
ccccatggaagggaatgtgcttctccacttaaacaagggtctgagcggagggctttctccatcccaaggccccagcccagaccggtgccttggcttactgcccccttaag

SEQ ID NO: 69446 - DNA, 110 bp, synthetic construct
  source 1..110: mol_type = other DNA
tctccatcccaaggccccagcccagaccggtgccttggcttactgcccccttaagggatgatgtttctgtttaattttcagggtttgggtcttggcccccctactgccga

SEQ ID NO: 69447 - DNA, 110 bp, synthetic construct
  source 1..110: mol_type = other DNA
ttgggttcgttaccactgagccacaacaggaacttccaaggccaacatttttagcagatcattcaaaaatattttctcagctttgtctcgtccacggaaggttttttgtg

SEQ ID NO: 69448 - DNA, 110 bp, synthetic construct
  source 1..110: mol_type = other DNA
ggaacctcttgtgcagagggtggaagccaggttaccttagcaacccttccccaaacagtgacctgcatgcaagagggtgaaattctgccaagaatgcagtttgccaagac

SEQ ID NO: 69449 - DNA, 110 bp, synthetic construct
  source 1..110: mol_type = other DNA
gagctctgatatttaaggggagctaatattctcctgggggaaaaggccctggtttccaagtgtggacttgagtttaggcaaccctgcctatctaggaaaactgtctctac

SEQ ID NO: 69450 - DNA, 110 bp, synthetic construct
  source 1..110: mol_type = other DNA
ccaagtgtggacttgagtttaggcaaccctgcctatctaggaaaactgtctctacatctgcccctggatctactttttccaagagcttttctttgtattttgattgctat

SEQ ID NO: 69451 - DNA, 110 bp, synthetic construct
  source 1..110: mol_type = other DNA
acaatgaacatcgttgccatagaaacccagcaacaagacaactgagaatctggttgactgagacaaataaatgttttcctctcatggcttgcagggagcctgataaattc

SEQ ID NO: 69452 - DNA, 110 bp, synthetic construct
  source 1..110: mol_type = other DNA
gactgagacaaataaatgttttcctctcatggcttgcagggagcctgataaattctgcctggttcctctctgctggggtggcaggagctgtatcaaaattcttttactgc

SEQ ID NO: 69453 - DNA, 110 bp, synthetic construct
  source 1..110: mol_type = other DNA
taacactagtttttagaatatgatgtagcaatacttaagttttcttagggaaatgacttggaagttaaaattctattcccagccaagatatccatcaaacaagagtacaa

SEQ ID NO: 69454 - DNA, 110 bp, synthetic construct
  source 1..110: mol_type = other DNA
acttggaagttaaaattctattcccagccaagatatccatcaaacaagagtacaaaatttaaaagacacttttcacacgcaaaggaggattagaactttactttgtatcc

SEQ ID NO: 69455 - DNA, 110 bp, synthetic construct
  source 1..110: mol_type = other DNA
acagagtggagagccataagcagcaagaaaccacagccaaccacttctcaccccactggaaaatgcttcactgtggctaacagcccaatatgtgctaactgttattgctg

SEQ ID NO: 69456 - DNA, 110 bp, synthetic construct
  source 1..110: mol_type = other DNA
ctggaaaatgcttcactgtggctaacagcccaatatgtgctaactgttattgctgtgttactcttattttcatgtatatttgctaatgcatgatgtctatgtctcttctc

SEQ ID NO: 69457 - DNA, 110 bp, synthetic construct
  source 1..110: mol_type = other DNA
tccttaacccactgagaagggccagggcatcctcgtggatgttagtgggattcatttcgctgagccgtgatgggactccctgtctctggtttgaataggttgtatgtcca

SEQ ID NO: 69458 - DNA, 110 bp, synthetic construct
  source 1..110: mol_type = other DNA
ttcgctgagccgtgatgggactccctgtctctggtttgaataggttgtatgtccaaagattttacctcatagacaccaggaaagtgaaatggctttcatgctggatgctt

SEQ ID NO: 69459 - DNA, 110 bp, synthetic construct
  source 1..110: mol_type = other DNA
gccaccacttgccaagcaagtctcacagagaaaataagactagagtgtgacagcgcagctccagatgggctctgaaacatcctccagcacctggtagatggactggttcc

SEQ ID NO: 69460 - DNA, 110 bp, synthetic construct
  source 1..110: mol_type = other DNA
ttctgatctgctgctagagcttgtgctctcatgtggggcgatgtcaggaggggccctgctctcaaccgctgccgctgccgcggtagctgctgttctcaattggctggcca

SEQ ID NO: 69461 - DNA, 110 bp, synthetic construct
  source 1..110: mol_type = other DNA
tctagtaacaggtgacaccagcctcctgaggacaaaattgaccctgcaaagctggaagtagcttcatgccatcagtgggacatcaatggaacatttttaacttgtaccat

SEQ ID NO: 69462 - DNA, 110 bp, synthetic construct
  source 1..110: mol_type = other DNA
gccttgacctgagaaggtaggcgatacgtggccaccttaccacatggtggtgatgcagggcacccttcaaaattcaaccttctccacgagctcccactcaccttcccagg

SEQ ID NO: 69463 - DNA, 110 bp, synthetic construct
  source 1..110: mol_type = other DNA
atgtgctgcctgcctcacccaatctttggtcccagagcccctgcatgtcactctgatgagggacaaagatgcaaacagaacagcgaccattcagaagatagtgtcgagga

SEQ ID NO: 69464 - DNA, 110 bp, synthetic construct
  source 1..110: mol_type = other DNA
tagcccagagtttccattatggctcagagggttaagagcccatcactgtctctgtgaggatgtgggtttgaccctggcctcattctgtaggctaaggatccagtgatgct

SEQ ID NO: 69465 - DNA, 110 bp, synthetic construct
  source 1..110: mol_type = other DNA
gagcccatcactgtctctgtgaggatgtgggtttgaccctggcctcattctgtaggctaaggatccagtgatgctgtaatctgtagtataggttgcagatgtagctcaga

SEQ ID NO: 69466 - DNA, 110 bp, synthetic construct
  source 1..110: mol_type = other DNA
gttttggcaccagttcccgcctctctgggaaagttccagagttaccctatctggttcacactgaaacccaagctcatctcgaagcatttgtgtgcaagggtacctgtcac

SEQ ID NO: 69467 - DNA, 110 bp, synthetic construct
  source 1..110: mol_type = other DNA
tccctttcaagagtctgtctttcttcacatctgcagagctgtacccgaggggacatccgtgacatttcctcgcccagcaagatgagaaccactccagcctgatcactctt

SEQ ID NO: 69468 - DNA, 110 bp, synthetic construct
  source 1..110: mol_type = other DNA
tccgtgacatttcctcgcccagcaagatgagaaccactccagcctgatcactcttgatctgacacgcttccttaattaggaatctctctcaggtctaggtttggttttgt

SEQ ID NO: 69469 - DNA, 110 bp, synthetic construct
  source 1..110: mol_type = other DNA
ggggaagaccaaaggcacctggtccttaggaaagcagagctgtgatgaatggaaaatgatttctttggcagtaacaggagggaagactggtcggctctccagaggtgtac

SEQ ID NO: 69470 - DNA, 110 bp, synthetic construct
  source 1..110: mol_type = other DNA
ccaacgtaagtgtggtcttggtgccataatggtggtggacgagcagggtggcagctgaactgtcagtcactttgctccccaccgaatatctgagcggctgccacatcctc

SEQ ID NO: 69471 - DNA, 110 bp, synthetic construct
  source 1..110: mol_type = other DNA
tgaactgtcagtcactttgctccccaccgaatatctgagcggctgccacatcctcaaacccttcctccccactgtcctgttctcatctcccatcatagattagatttgct

SEQ ID NO: 69472 - DNA, 110 bp, synthetic construct
  source 1..110: mol_type = other DNA
agcgatatcctgtttggatagaaagtgaatgttggttttttgcattgttggttttgagtggaaaagggacgcttacaaaaccgggcctgtcccctatactttctctcatt

SEQ ID NO: 69473 - DNA, 110 bp, synthetic construct
  source 1..110: mol_type = other DNA
gagtggaaaagggacgcttacaaaaccgggcctgtcccctatactttctctcattcatttcccctgtggataggggagaaggcataggaatacgctgtgtcctcctgctt

SEQ ID NO: 69474 - DNA, 110 bp, synthetic construct
  source 1..110: mol_type = other DNA
tagatgacttcatagtttataagccctttattttgaaaaactcaaagctgtatgtggacctaaggggccacccctagcatgtaaaagctatagatccattcccccaggtg

SEQ ID NO: 69475 - DNA, 110 bp, synthetic construct
  source 1..110: mol_type = other DNA
ggacctaaggggccacccctagcatgtaaaagctatagatccattcccccaggtggagccagggcgctgaatgcaaacagtgttttcagtgtccactggcaggaaccatg

SEQ ID NO: 69476 - DNA, 110 bp, synthetic construct
  source 1..110: mol_type = other DNA
acttctggagaccttgccatcatcagtaccagctctcaggactttcccttctctatgcctttgctcatggcgctccttcccatctgggaaaacctaccctccctctcctg

SEQ ID NO: 69477 - DNA, 110 bp, synthetic construct
  source 1..110: mol_type = other DNA
atatatatacattttcgggattagaaaaccgtttttccaaagctggagcccatttacctctgcatccatacaggcagacacatggcttctcaaaacagcacagcaaatct

SEQ ID NO: 69478 - DNA, 110 bp, synthetic construct
  source 1..110: mol_type = other DNA
tgggattcctagagaagggaattgaagggaactgcctcagacaggcaccttacgttaatccgaagtgagaagtcagtcaaaaggacttgtgttggaattcccattgtggc

SEQ ID NO: 69479 - DNA, 110 bp, synthetic construct
  source 1..110: mol_type = other DNA
tatatcctgatcttaacctgctcccaccctctgatctcctgctggtacctcccatttggccaaacccaatgggaagcctggggcccagggctagagtgaccaaccatccc

SEQ ID NO: 69480 - DNA, 110 bp, synthetic construct
  source 1..110: mol_type = other DNA
aaatatccagatactgctatcctaccgggaccaggaagaatgcagtgttagcactggcatggcccatggaccattgggcagttggcccagaacactgaaggacactagtc

SEQ ID NO: 69481 - DNA, 110 bp, synthetic construct
  source 1..110: mol_type = other DNA
ggcatggcccatggaccattgggcagttggcccagaacactgaaggacactagtctccatatagccatggccatataaggtacaaatcccgcactcatctgcaagggatg

SEQ ID NO: 69482 - DNA, 110 bp, synthetic construct
  source 1..110: mol_type = other DNA
cctgaactgtaagttgagtgcaaaaaagaacctaaggtttgttgtcttggtcaaatatggatgtcttccggacaagtcctaaagctcagtggcttcaaacaggtgtggct

SEQ ID NO: 69483 - DNA, 110 bp, synthetic construct
  source 1..110: mol_type = other DNA
gcaggttgatgtggacatgactgttggggttggcctttctacttctccctccctattccatgcctcctgtttagtagtgcagtgctattagtctggccttttcagttctt

SEQ ID NO: 69484 - DNA, 110 bp, synthetic construct
  source 1..110: mol_type = other DNA
ttccatgcctcctgtttagtagtgcagtgctattagtctggccttttcagttcttatagctttcagtttcattcaagacagacttttcattcattcattcacttatagca

SEQ ID NO: 69485 - DNA, 110 bp, synthetic construct
  source 1..110: mol_type = other DNA
gagtagccctcccatagtcaacacaggccctgccctcaccaaatcctcctgatcccaagacagcagggtgtcctgaggtctgtcacctttcctgacctcagcataaccac

SEQ ID NO: 69486 - DNA, 110 bp, synthetic construct
  source 1..110: mol_type = other DNA
ggcccagagtgtatgcagctcaggagcaggcaatctggctgcttttcctgaaacacaattttcttttcttcttggccctgctccttcttggccccagaaagctgggtttt

SEQ ID NO: 69487 - DNA, 110 bp, synthetic construct
  source 1..110: mol_type = other DNA
cctgcagccaagcctccactcttcctcagcacccagctacctgccttcttcatttctcctttttttttctggagtccatctttccggattcattcttatctgttgtccac

SEQ ID NO: 69488 - DNA, 110 bp, synthetic construct
  source 1..110: mol_type = other DNA
ctcctttttttttctggagtccatctttccggattcattcttatctgttgtccactaatcctgattcatcccttccttcctgtctctacgtcccctccttgtcctcttct

SEQ ID NO: 69489 - DNA, 110 bp, synthetic construct
  source 1..110: mol_type = other DNA
ggttttcaggaaaagggagtgtctccctgaccccgatcttgtgtcacttattcactcaactggtctgcatttattgaatgtctaagaggtacccagccctgggcttgatg

SEQ ID NO: 69490 - DNA, 110 bp, synthetic construct
  source 1..110: mol_type = other DNA
tcaactggtctgcatttattgaatgtctaagaggtacccagccctgggcttgatgttatgggagatacaaagaataagtcatgcctcctgcctccaggagcttacagtcc

SEQ ID NO: 69491 - DNA, 110 bp, synthetic construct
  source 1..110: mol_type = other DNA
aaggagttccctttggctcagtgagataagggtctggcattctcactgcagtggcctgggtcactactgtggtgcagattctgtctctggctgggaaacttgtacaagct

SEQ ID NO: 69492 - DNA, 110 bp, synthetic construct
  source 1..110: mol_type = other DNA
ctgggtcactactgtggtgcagattctgtctctggctgggaaacttgtacaagctgcagatgcaaccaagagtgagtgaatggatggatggataaataaatgaatggata

SEQ ID NO: 69493 - DNA, 110 bp, synthetic construct
  source 1..110: mol_type = other DNA
aatagacaggccttgggctttgcaggtaggggatataacctgttcttccctgcgggatgttgagctccattgggcacatagcaagacacttcaaaaataattgggttggt

SEQ ID NO: 69494 - DNA, 110 bp, synthetic construct
  source 1..110: mol_type = other DNA
gaagatgtgaggtccagagagaggtgtttagatttctttttaaggtcagcgctgttgtcctgggtctgcgtgccaaggggagcaagtccgtagcttttccccagaaagtc

SEQ ID NO: 69495 - DNA, 110 bp, synthetic construct
  source 1..110: mol_type = other DNA
tgtcctgggtctgcgtgccaaggggagcaagtccgtagcttttccccagaaagtcccatcaccctggggaggaggtctctgcaaaggggaaggacaagcatttagggaag

SEQ ID NO: 69496 - DNA, 110 bp, synthetic construct
  source 1..110: mol_type = other DNA
ggagacggagcaccagtggaggctgggaggataaggaaggagcaaagagtctgtagttgctaagagtacaaatgtccaaacacagtcttggtcatcaaatcctagcagga

SEQ ID NO: 69497 - DNA, 110 bp, synthetic construct
  source 1..110: mol_type = other DNA
tgagtggccttggaggaccccctggctgacctctcttcagtgcccacctcacagccatttccttcttcaagctatcctccagtgctgctccagacctgccccacttaaac

SEQ ID NO: 69498 - DNA, 110 bp, synthetic construct
  source 1..110: mol_type = other DNA
taggagggtgtcgaaggcaacatttagcccttgtgccatttggctgaggatttcttcctccttctgagtgtgaacaaagtcatagagtttaaatctgggagctacttaaa

SEQ ID NO: 69499 - DNA, 110 bp, synthetic construct
  source 1..110: mol_type = other DNA
tcctccttctgagtgtgaacaaagtcatagagtttaaatctgggagctacttaaaaatgatctgacttgctctcacaccccaaataggagcctgtatatagtatctctga

SEQ ID NO: 69500 - DNA, 110 bp, synthetic construct
  source 1..110: mol_type = other DNA
gttctgtttgtcccgctcttcccgggtagttttaaatgcatttccttaaggagacagctttagccaggccgattttgcctgagctgccctctgtcagtctgttcaggaca

SEQ ID NO: 69501 - DNA, 110 bp, synthetic construct
  source 1..110: mol_type = other DNA
ttacctggaatcttgtggaaatgcaggtctgattcagtagtgtggggcctgagtgtctgcatttctttcaagctctcaggggaagctgatgctgctggtcctcagattac

SEQ ID NO: 69502 - DNA, 110 bp, synthetic construct
  source 1..110: mol_type = other DNA
tggggactgatagtctggggctggtgctgggacttaattttatcagaaactctgggccctttccactttttctgttttaccatttttatcatgagggctgttgtttttat

SEQ ID NO: 69503 - DNA, 110 bp, synthetic construct
  source 1..110: mol_type = other DNA
tgttttcaagttgtatgtgttgttcatctatgtagatattagtcccttactggttatatatcatttgcaaatattttctcccgttcattgggttgccttttcattctgtc

SEQ ID NO: 69504 - DNA, 110 bp, synthetic construct
  source 1..110: mol_type = other DNA
atattagtcccttactggttatatatcatttgcaaatattttctcccgttcattgggttgccttttcattctgtcactggtttcctttgttgtgcaaaggcatttaagtt

SEQ ID NO: 69505 - DNA, 110 bp, synthetic construct
  source 1..110: mol_type = other DNA
cagtgcacctgggtgtacacctttgctcagaaggagagatgaccacacctgcaattatatactgattgatgagctataaccagtggtttggctagataggcaaagactta

SEQ ID NO: 69506 - DNA, 110 bp, synthetic construct
  source 1..110: mol_type = other DNA
gagtcatgaaaaaagaagatggtaaaataaacagaaataagcataacaattcttatgcaaattcctaaggagcagaacagcacgggggccttgtggctgccaatcccata

SEQ ID NO: 69507 - DNA, 110 bp, synthetic construct
  source 1..110: mol_type = other DNA
tgcaaattcctaaggagcagaacagcacgggggccttgtggctgccaatcccatacaccctgggctgctgggctgaggagcacttggctctaatcccctctccctggcca

SEQ ID NO: 69508 - DNA, 110 bp, synthetic construct
  source 1..110: mol_type = other DNA
aagaccaaaaaaaaaaaaaaaaaaagaaagaggcaaagagagaagagagagaccatgaaatattcaaggagctgtaactagtttaataagactaaagagtagccttggat

SEQ ID NO: 69509 - DNA, 110 bp, synthetic construct; identical to SEQ ID NO: 69508
  source 1..110: mol_type = other DNA

SEQ ID NO: 69510 - DNA, 110 bp, synthetic construct
  source 1..110: mol_type = other DNA
aagcagaggctttcattgatatgggatcttcaacaaacacctaaaggcttggtcatgacatgaaggtgccccttgctcaagaagacacatttgtcactctttggagtttc

SEQ ID NO: 69511 - DNA, 110 bp, synthetic construct
  source 1..110: mol_type = other DNA
tctcagctgctacctctgaataattattccatctccctcagccaggtaggccattgctcaggctgcccctaaaatggcaatgcatccttcactgcagctttgcattcaag

SEQ ID NO: 69512 - DNA, 110 bp, synthetic construct
  source 1..110: mol_type = other DNA
tcgtggtttcctgtgtcgggtgactttcctggtggagagtgaagatggcaacacgcgcatcaccacagaccgctccatcagctggaactgccctcttgcctctgttctca

SEQ ID NO: 69513 - DNA, 110 bp, synthetic construct
  source 1..110: mol_type = other DNA
ctccatcctaccatggactccggaagctctttctttaatatacagtttcttgttctgttacctcctctgagctcagatcactggatatgagggacttagacgcccggatt

SEQ ID NO: 69514 - DNA, 110 bp, synthetic construct
  source 1..110: mol_type = other DNA
ccacttcctagagtaatggaaccaaaagctaaaataaaagagaccaaattaagcctacgcatttctgtacagcaaaagaaccatgaacaacacaacaagaaaacctacag

SEQ ID NO: 69515 - DNA, 110 bp, synthetic construct
  source 1..110: mol_type = other DNA
catttctccctagccctctgctactgcttgcttggctagtgtattctcacgggtactggtcttctgtcccctgatgagaccaagggtttttgtaggcagaggtcaaagtt

SEQ ID NO: 69516 - DNA, 110 bp, synthetic construct
  source 1..110: mol_type = other DNA
ctggtcttctgtcccctgatgagaccaagggtttttgtaggcagaggtcaaagtttgctgtttgaatccccctcagcatctagcacaggacttggtacacagttggcctt

SEQ ID NO: 69517 - DNA, 110 bp, synthetic construct
  source 1..110: mol_type = other DNA
caacatttattggcttagatggtgtcctaatgagctctctccaatctgttctaagcaaatcaaatagatttaaaaaaaaattttttttttgaggtaaagccaaagccaaa

SEQ ID NO: 69518 - DNA, 110 bp, synthetic construct
  source 1..110: mol_type = other DNA
cgtgctgttcttctagcaaggctttgggaagggaggggaataggcttccttagctcagatgccgcatggcttgtgggaggtgcggggacacggagtgtctgcatttgtat

SEQ ID NO: 69519 - DNA, 110 bp, synthetic construct
  source 1..110: mol_type = other DNA
cagatgccgcatggcttgtgggaggtgcggggacacggagtgtctgcatttgtatttgcaggggtgagcaggtcagtactggaaagagaagagcatggcttgggctggga

SEQ ID NO: 69520 - DNA, 110 bp, synthetic construct
  source 1..110: mol_type = other DNA
cggagaatggcgacatcatcgcagaggtacgcgtttcctcttcatcatctcgatgtgacccccggggcgaggggcagccttgagagagtggagcggcatgcgtggttcag

SEQ ID NO: 69521 - DNA, 110 bp, synthetic construct
  source 1..110: mol_type = other DNA
ttggcaatctctctatggtgttcctggcattatcataaaggttattaatttttcgagacactaaatgcgttaactcaagaacacagaaagtgaagtctattgtgagtggt

SEQ ID NO: 69522 - DNA, 110 bp, synthetic construct
  source 1..110: mol_type = other DNA
ctctgcaatctgaccttcactcacctcctatcctaacttccccatactttccaactaagtccttcaccctagctagcctggtctgctcactggtttccatcaaacctctc

SEQ ID NO: 69523 - DNA, 110 bp, synthetic construct
  source 1..110: mol_type = other DNA
cctgagacctgtcttgaggtacagactcaaacagagctcagtcctcttcctatatggtgaatactcaagtttcttcatttgttccccaccatccagttttgccaattcgt

SEQ ID NO: 69524 - DNA, 110 bp, synthetic construct
  source 1..110: mol_type = other DNA
aaagaggtccagaggggacaagatacttatcataaatcacagagacaagagctaagttacatcctaaaatccacactcctcaaggtaaactagggtggaaagggcgcagg

SEQ ID NO: 69525 - DNA, 110 bp, synthetic construct
  source 1..110: mol_type = other DNA
gctggcttcttcagatgaaaaagagacagctctccattgaacctgcaggctgttgaggatagtcagactaacaagacaatgtgctaaatgaatgctaaggaagtgtgggg

SEQ ID NO: 69526 - DNA, 110 bp, synthetic construct
  source 1..110: mol_type = other DNA
gacggtttagcacagggctgctgccaactggaagccagcccccgggtctgaggtagtgacaccagcacattcgtagccattaaatcacccatgtctgggctttgacgaga

SEQ ID NO: 69527 - DNA, 110 bp, synthetic construct
  source 1..110: mol_type = other DNA
acccatctctgatgcaggattgaaaacagttcccccaagtgatgtgctggtccatagcagcttgagggtcactgcttcagagccaaaggctgctcactccaatgtagcac

SEQ ID NO: 69528 - DNA, 110 bp, synthetic construct
  source 1..110: mol_type = other DNA
caggaactcccacaagtcttgtttttgagagatcatctacactctacacttgtgaccttgaccccatagccccactcagctgctcaccaacagctcctgaacacaggact

SEQ ID NO: 69529 - DNA, 110 bp, synthetic construct
  source 1..110: mol_type = other DNA
ccttgaccccatagccccactcagctgctcaccaacagctcctgaacacaggactcctgcccatgtgcaacctgcctctcctggtcctcccttgctgagcccagctctcc

SEQ ID NO: 69530 - DNA, 110 bp, synthetic construct
  source 1..110: mol_type = other DNA
ttcaaagagtgccttggttgttaagagtcacctagctcccctccctagagctttcgattccccaggtctgagagaggagcccagcaaagaatgagaagaagcacctccag

SEQ ID NO: 69531 - DNA, 110 bp, synthetic construct
  source 1..110: mol_type = other DNA
gaagttaagtgaagaggcacagggagaatgctatgtgaagattggatttatgttgccagaagccaaggaactactagaagctagggagagataactggaacaggctcttc

SEQ ID NO: 69532 - DNA, 110 bp, synthetic construct
  source 1..110: mol_type = other DNA
ccagaagccaaggaactactagaagctagggagagataactggaacaggctcttccctagtacctttggagggagcatggctttgccaacaccttgatctcggacttcac

SEQ ID NO: 69533 - DNA, 110 bp, synthetic construct
  source 1..110: mol_type = other DNA
tttctttgtatttggttttcagcagtttgactgtgatatgccttagtaattcactgagcttcttgaagctagtaatttgtgttttctaaaatatttggggaaatttttgt

SEQ ID NO: 69534 - DNA, 110 bp, synthetic construct
  source 1..110: mol_type = other DNA
aataaatctctgttgactgaataaactagaagattctctccatctctggaacgacctataggaagttatgacacactctgcattctcaaactgcttattattttattccc

SEQ ID NO: 69535 - DNA, 110 bp, synthetic construct
  source 1..110: mol_type = other DNA
ctataggaagttatgacacactctgcattctcaaactgcttattattttattccctttaatttccatctatttgaatgactaaattcctggccatgatgtttcaaactca

SEQ ID NO: 69536 - DNA, 110 bp, synthetic construct; identical to SEQ ID NO: 69534
  source 1..110: mol_type = other DNA

SEQ ID NO: 69537 - DNA, 110 bp, synthetic construct; identical to SEQ ID NO: 69535
  source 1..110: mol_type = other DNA

SEQ ID NO: 69538 - DNA, 110 bp, synthetic construct
  source 1..110: mol_type = other DNA
tcaattttggggtaccactttcattggtggctagtttcacttccacatagattctgtagctgatgggctctgggtgtttttaccatcttgagttgcagttttcttatctg

SEQ ID NO: 69539 - DNA, 110 bp, synthetic construct
  source 1..110: mol_type = other DNA
gtagctgatgggctctgggtgtttttaccatcttgagttgcagttttcttatctgcaaataacaccagccacagggtgatcatgaagaatttacgtaatttctggcaatg

SEQ ID NO: 69540 - DNA, 110 bp, synthetic construct
  source 1..110: mol_type = other DNA
aatggagtgaaggcagggtcaagagaggagtggtccctctctttagcaaatagagaatggatgaacctctccggaacaaaagaatacctttctagacagcttagcttgat

SEQ ID NO: 69541 - DNA, 110 bp, synthetic construct
  source 1..110: mol_type = other DNA
aatggatgaacctctccggaacaaaagaatacctttctagacagcttagcttgattcaactcacccttacaacactcagaagggttcctagggcctggggagtcctagca

SEQ ID NO: 69542 - DNA, 110 bp, synthetic construct
  source 1..110: mol_type = other DNA
agtggttagcctcacctgattctagatcttagggggaaattattcaccagtaagaatgatgctatgaatgaatgaatgaatgaatgaataaataaataaagtcaacaatg

SEQ ID NO: 69543 - DNA, 110 bp, synthetic construct
  source 1..110: mol_type = other DNA
ctgattctagatcttagggggaaattattcaccagtaagaatgatgctatgaatgaatgaatgaatgaatgaataaataaataaagtcaacaatggctaagattctagcc

SEQ ID NO: 69544 - DNA, 110 bp, synthetic construct
  source 1..110: mol_type = other DNA
ccagtgggtagaattcttggaggcagaagaaaatttcccaggtcaggccactgcactgacctatggacaagaccactgccagactgagagaaccagactaggggctgggt

SEQ ID NO: 69545 - DNA, 110 bp, synthetic construct
  source 1..110: mol_type = other DNA
tcattgcaaagataataatgttctttaaatttgctttacgtcttatgagtctccgaagtgctttcacacaccctgcttcattcataccgtatagaggaggaaataggagc

SEQ ID NO: 69546 - DNA, 110 bp, synthetic construct
  source 1..110: mol_type = other DNA
cttctcatggcaacttgtgtgccagtcaccccaggaccactctggactgacccagtcaacccagcgccactctggatcaatctagttagcagttcatccttccctatttt

SEQ ID NO: 69547 - DNA, 110 bp, synthetic construct
  source 1..110: mol_type = other DNA
tcaacccagcgccactctggatcaatctagttagcagttcatccttccctattttgtacctaaaacatgtaggttcgcagactagaggttgaactggagctgtagttgct

SEQ ID NO: 69548 - DNA, 110 bp, synthetic construct
  source 1..110: mol_type = other DNA
cctaaaagcatcccctgtttgtgcactattaatggtcagccaattacctcgcaggagttatgctcagaaaccttgaacataaaccttcgccttctgctgcctgagctgtg

SEQ ID NO: 69549 - DNA, 110 bp, synthetic construct
  source 1..110: mol_type = other DNA
agttatgctcagaaaccttgaacataaaccttcgccttctgctgcctgagctgtgtgtggttggaggagtaaatgcaaatctacattaagtcctcaggtctccctgggct

SEQ ID NO: 69550 - DNA, 110 bp, synthetic construct
  source 1..110: mol_type = other DNA
tccccatttttctcccacaggcattaagctcctttggcatctgcttctcagagactcagggctaactcaggtggctttggcaggtccaactctgcttccagtatggtcag

SEQ ID NO: 69551 - DNA, 110 bp, synthetic construct
  source 1..110: mol_type = other DNA
cctgcctcctgcgtctggaggtgcttagtggcttcctgtagagctctgcactggccggctgtattctaggcttctgcccacttgcaccatcccctcaactgcaccccctg

SEQ ID NO: 69552 - DNA, 110 bp, synthetic construct
  source 1..110: mol_type = other DNA
cggctgtattctaggcttctgcccacttgcaccatcccctcaactgcaccccctgcctttacttctccaaagtgaagatgacctccgggacacgccccaccctgcctcac

SEQ ID NO: 69553 - DNA, 110 bp, synthetic construct
  source 1..110: mol_type = other DNA
tgtggaaaatggtatgggcatccctaaagctccagatgctgagccctcattcatcacactctatggcagtctccttgtatgttcatttgggtatggatgttagaacaaga

SEQ ID NO: 69554 - DNA, 110 bp, synthetic construct
  source 1..110: mol_type = other DNA
gtctggctgcagggcccaggagtcccagagctcatgttagaacactagtgggcagggccaccaatgatgtagcaaatgataagatttcatccttgtatggctgagtaata

SEQ ID NO: 69555 - DNA, 110 bp, synthetic construct
  source 1..110: mol_type = other DNA
tgggtctaggagatttgaggcaaggaaatgagtcaaaggtgcagtaggggaaagccctggttactcaatggcttacattagtttctaataaataattactaaaaacataa

SEQ ID NO: 69556 - DNA, 110 bp, synthetic construct
  source 1..110: mol_type = other DNA
tctgcctaaaaggagctccagaaacagagggcagctaagacagcaggaggaaacgatcaaatgctttgtctcagaacatgcccgtcccagaagtctccagattaaaaccc

SEQ ID NO: 69557 - DNA, 110 bp, synthetic construct
  source 1..110: mol_type = other DNA
cgtcacagtgggttaagcattcaaccacaacagctcaggtggctgcagagttatgggtcctatccccagccccagcccaagcgcagtgggttaaaggatctggcagccct

SEQ ID NO: 69558 - DNA, 110 bp, synthetic construct
  source 1..110: mol_type = other DNA
ttacttcaaaatagtacagatgtgatgaaatgggtgaggggataaaaataactggattggccaggagtttgtaattgcaagggatgaattatgaggtatatgggaactca

SEQ ID NO: 69559 - DNA, 110 bp, synthetic construct
  source 1..110: mol_type = other DNA
agaaaggcaccatagacacaaactgacttctccatctgtatggcaggtttagacatacttagagaaacaaacagaggcctttccagcaggcctttccctaccttgttcct

SEQ ID NO: 69560 - DNA, 110 bp, synthetic construct
  source 1..110: mol_type = other DNA
ctcttcatcccaatcctacacttcacaacagaaaagagaaagtgagctgtcatcgccacagtctttgacatgtcacaggagcagaaaggagcaggggtagaggatgcaca

SEQ ID NO: 69561 - DNA, 110 bp, synthetic construct
  source 1..110: mol_type = other DNA
aacgctgcatgcaggcttatgggcagcaaatatgctgagaaaaaaaggatgcatacaggagaattgttttgcttcggtgtgccgtgaactttgagggaacttggtaaaac

SEQ ID NO: 69562 - DNA, 110 bp, synthetic construct
  source 1..110: mol_type = other DNA
caggagaattgttttgcttcggtgtgccgtgaactttgagggaacttggtaaaacacggaacgtttatgaccctgatggatggctctccagggactggctgctcaccctt

SEQ ID NO: 69563 - DNA, 110 bp, synthetic construct
  source 1..110: mol_type = other DNA
ggaaaaatcactgctgatgggcacctccatcaagcccacccctgtgtccacgcagccttgagactagagctcgtgtgctccttgggtggaccctggagacacattcttct

SEQ ID NO: 69564 - DNA, 110 bp, synthetic construct
  source 1..110: mol_type = other DNA
ccatagaaaacttgaaaaagctggattaagtgatctgaagaaaatcaggaagagcagatccaaatcaagcctgtgaagcctgttgtctaagtcacagtgagaggctatat

SEQ ID NO: 69565 - DNA, 110 bp, synthetic construct
  source 1..110: mol_type = other DNA
aacaaatgcaactgaatgtaactggcccttgaactagttgtcattttcttcttgccctaaacctaaatatgtcctttctttgtttgctgttctgaggctttggggaaaga

SEQ ID NO: 69566 - DNA, 110 bp, synthetic construct
  source 1..110: mol_type = other DNA
tttggcaaatttaccaaggtctaacgagtgagtgaggtgtgcaacttcgacgcagttatgtccgatcccagcaaaagggtaccattagtgattaaggagggtgagcacac

SEQ ID NO: 69567 - DNA, 110 bp, synthetic construct
  source 1..110: mol_type = other DNA
ttatgtccgatcccagcaaaagggtaccattagtgattaaggagggtgagcacacacagacaaaaatacccacaccccacaagcagctctttttgtactcgcggtgagaa

SEQ ID NO: 69568 - DNA, 110 bp, synthetic construct; identical to SEQ ID NO: 69566
  source 1..110: mol_type = other DNA

SEQ ID NO: 69569 - DNA, 110 bp, synthetic construct; identical to SEQ ID NO: 69567
  source 1..110: mol_type = other DNA

SEQ ID NO: 69570 - DNA, 110 bp, synthetic construct
  source 1..110: mol_type = other DNA
ctccctgaattgactcttgctcccgtaaagtccatacttcagatctttcacccaacagcttgtataatcatataaaggcataagtcagttcataccaacaggaaaaggtc

SEQ ID NO: 69571 - DNA, 110 bp, synthetic construct
  source 1..110: mol_type = other DNA
tttcatgtgagccatgtccagtgccagatccactgcttctctcctgggtgatgccatgtgtcctctatatagctaaagcagtagagacccattatctatgtccttgtaaa

SEQ ID NO: 69572 - DNA, 110 bp, synthetic construct
  source 1..110: mol_type = other DNA
taggcacagggcttaaaaagtggaaaaggagagacagctcctcagagtaacaggtgtctggggttgctgtgcaaatgaccacaaactaagggacacaaaacaagaggaat

SEQ ID NO: 69573 - DNA, 110 bp, synthetic construct
  source 1..110: mol_type = other DNA
ctgctacactactccaaaattcaaggtttaaagtaattgacatgattcttcttcaaggtgaaaattttggttaactctcaggctggctagcccttttccgggctcactca

SEQ ID NO: 69574 - DNA, 110 bp, synthetic construct
  source 1..110: mol_type = other DNA
tatgatttcctctaagggttttacagtgtctggtcttatatctacgtttttaatccatttggagttttttttctgtatggtgttatggagtgttctaattgcatcctttt

SEQ ID NO: 69575 - DNA, 110 bp, synthetic construct; identical to SEQ ID NO: 69574
  source 1..110: mol_type = other DNA

SEQ ID NO: 69576 - DNA, 110 bp, synthetic construct
  source 1..110: mol_type = other DNA
gcttgtcagagggttgagaagtgaattaaatgccacacagaagtgatgtaatagaactgatctattatagaggaatgaggatgaacagcttgggcgggagggcagagaag

SEQ ID NO: 69577 - DNA, 110 bp, synthetic construct
  source 1..110: mol_type = other DNA
actgatctattatagaggaatgaggatgaacagcttgggcgggagggcagagaagtctggagcctaattactgggtaacgaggtatgatagagcaatccagagtgaaaaa

SEQ ID NO: 69578 - DNA, 110 bp, synthetic construct
  source 1..110: mol_type = other DNA
aaagagggcaaagcctcctaagaaagttccctgcttgcagccttctctcctgcagttagtactccctgtcgtgggcagacagagctttttaaaatgctaatgagattatc

SEQ ID NO: 69579 - DNA, 110 bp, synthetic construct
  source 1..110: mol_type = other DNA
agcctgtacggctgtcccaagcaggaaagcaagaaggatggtgggtttccaaatagcctcagattctggacgcagaggagcaaaaaagcataagccaaagcttgggcttc

SEQ ID NO: 69580 - DNA, 110 bp, synthetic construct
  source 1..110: mol_type = other DNA
gcctcagattctggacgcagaggagcaaaaaagcataagccaaagcttgggcttctggcatccgggaatcagcattagaagccagacaaaaatctgcactctgatcaaag

SEQ ID NO: 69581 - DNA, 110 bp, synthetic construct
  source 1..110: mol_type = other DNA
ttcacctgggacacacagaatgaactgtcccttgattgtcaccagcatttcattcacgcacacaaatgtccctgttaatgtccgcacattactggtggcttcttttgagc

SEQ ID NO: 69582 - DNA, 110 bp, synthetic construct
  source 1..110: mol_type = other DNA
acgcacacaaatgtccctgttaatgtccgcacattactggtggcttcttttgagcttatggccagcacagctcttgagtctttttcgttcagtcaggtcttctataattt

SEQ ID NO: 69583 - DNA, 110 bp, synthetic construct
  source 1..110: mol_type = other DNA
gcagtctgggcacacagggatactcatgccggagggctgggaggagtcctggataggctcagttggagctgctcagtacagtgtgctatgtaaagagagtcccccaaatg

SEQ ID NO: 69584 - DNA, 110 bp, synthetic construct
  source 1..110: mol_type = other DNA
acccacaggccgccaggcccagggctggtgtagtacccctacccaccctcaagaaaggttgtcttcaccaccccttttaaattcagctgatctaaatacttagtttaaat

SEQ ID NO: 69585 - DNA, 110 bp, synthetic construct
  source 1..110: mol_type = other DNA
ggggaaatagaaagaacaaagataacacagagagagtgagaggagagagagactagtctgtctgcactgatcagagatagatatgactggaggtgataatggaaacaaaa

SEQ ID NO: 69586 - DNA, 110 bp, synthetic construct
  source 1..110: mol_type = other DNA
tgatcttgtctgcccttttgaaataatccaaacagtaatatcctcatttgatctcagcttgaaaacccactgtgactttcacgaccaatttcctgcactgcacaggcaat

SEQ ID NO: 69587 - DNA, 110 bp, synthetic construct
  source 1..110: mol_type = other DNA
agcttgaaaacccactgtgactttcacgaccaatttcctgcactgcacaggcaatggaatgctcagctgtagcatgctgtgaccacaaacggacacacctagactaaaat

SEQ ID NO: 69588 - DNA, 110 bp, synthetic construct
  source 1..110: mol_type = other DNA
cttattcctagactctacataggtggggggggtgtgcccatctcttacagaaatagagatgacatggggaggaactgaagaacataaaagaagaccccaacaggagcttc

SEQ ID NO: 69589 - DNA, 110 bp, synthetic construct
  source 1..110: mol_type = other DNA
cacagaggctgacagcctaatggtttcaaatataagcaggggaagcattccgcccacaaccagagccagcttggccctgggcgccccgtgagctgggcaggggctgcgtg

SEQ ID NO: 69590 - DNA, 110 bp, synthetic construct
  source 1..110: mol_type = other DNA
acaaccagagccagcttggccctgggcgccccgtgagctgggcaggggctgcgtgtgcaagtgtttttatggatagtgtttggtcgccttctgtttctgatagagactgg

SEQ ID NO: 69591 - DNA, 110 bp, synthetic construct
  source 1..110: mol_type = other DNA
gcaataagtttatttcacattactgtatcccaggaattagaactttccaatctatgacaagaggccctgtttataatttcaaaatgcatatactagtagaaatatgcata

SEQ ID NO: 69592 - DNA, 110 bp, synthetic construct
  source 1..110: mol_type = other DNA
gcacactgtttcccttgcctgcatattgtcttcgtccactcctgactttccatctgatctccacacaggagcccctcccccaaagggcttcctgtcccgtctaacttaga

SEQ ID NO: 69593 - DNA, 110 bp, synthetic construct
  source 1..110: mol_type = other DNA
gatctccacacaggagcccctcccccaaagggcttcctgtcccgtctaacttagattcctgtgtcttccatccagcagcatggcccctggtcagctggggagacctccca

SEQ ID NO: 69594 - DNA, 110 bp, synthetic construct
  source 1..110: mol_type = other DNA
ttgaaccctcatcctcatggatacttgtcaggttggttaccgctgagccacaatgggaactccccgcttcatgtctctgagcttcagtctccttgtttataaattgagat

SEQ ID NO: 69595 - DNA, 110 bp, synthetic construct
  source 1..110: mol_type = other DNA
caatttacatgagggttcactcttggtgttgtacatgctctgggtctgggccagtgtataatgacatgtagccactgttataaaatcacatagagtagtttcactgccct

SEQ ID NO: 69596 - DNA, 110 bp, synthetic construct
  source 1..110: mol_type = other DNA
ggttgagaccaggaatctttatttccagcaaatcccaggggcttttggtgcccctggggaacccactttgagaaccagcttatggccagccgcccctctggggaccatga

SEQ ID NO: 69597 - DNA, 110 bp, synthetic construct
  source 1..110: mol_type = other DNA
ctacagggatctacccaccccatattctgtcccctgaattcctccatggaacccatggctgttcctcttcccgtccacttccacctcctgattaaatagcagccccacgg

SEQ ID NO: 69598 - DNA, 110 bp, synthetic construct
  source 1..110: mol_type = other DNA
tggctgttcctcttcccgtccacttccacctcctgattaaatagcagccccacggcatggggcagggtggagggggttgacttgattttggcccttctctcatactcact

SEQ ID NO: 69599 - DNA, 110 bp, synthetic construct
  source 1..110: mol_type = other DNA
aggcaagtataaattagctggggattattagtttagatcattttagaccatggtatggaaacaagagacactacagctcatgtgtagacaagactgttaacacttgcaga

SEQ ID NO: 69600 - DNA, 110 bp, synthetic construct
  source 1..110: mol_type = other DNA
ctgcctccaatctgttgtgggagcatctggtggggctgggggagaagaaccacttcatctgcagccctcagggctctgcatcttcactccagctctcggcaatccctgca

SEQ ID NO: 69601 - DNA, 110 bp, synthetic construct
  source 1..110: mol_type = other DNA
aaccagacaatagccagggtgctgaagcaaacaaaatctgttgtgaatagcttgcccaagatttgggacaaggtctgtcgaatcttcctttttatttgcctcttcccacg

SEQ ID NO: 69602 - DNA, 110 bp, synthetic construct
  source 1..110: mol_type = other DNA
tcttcttcagccctccccctaaaacccaaaactgacagaatggaaaagagaaatagacaaatccacagtaagatttggagatttcaacactcctctctcagtaacagata

SEQ ID NO: 69603 - DNA, 110 bp, synthetic construct
  source 1..110: mol_type = other DNA
ccctggaacttcaggcctccaatgctagccagctagccgtacgtgaataatccacagacaaaggttacctgtaggacgttaaagtctaaagcctccccccaccccgggac

SEQ ID NO: 69604 - DNA, 110 bp, synthetic construct
  source 1..110: mol_type = other DNA
agacaaaggttacctgtaggacgttaaagtctaaagcctccccccaccccgggactgcttttgtcaactagagcctattcaggcctgcgaaggatctcaagacagcaggg

SEQ ID NO: 69605 - DNA, 110 bp, synthetic construct
  source 1..110: mol_type = other DNA
gcatatgtcttcctggtggacaccacctagaagttgtcacatgacttcttctatatctcatgggtttaagacttagtgacatggccacacccgcttactagggaggttgg

SEQ ID NO: 69606 - DNA, 110 bp, synthetic construct
  source 1..110: mol_type = other DNA
cctactccaatatgacctcctctgaactaagtacatctacaatgtccttatttcccccaccccttttttctttttcagccacgcctgaggcatatggaagttccagggcc

SEQ ID NO: 69607 - DNA, 110 bp, synthetic construct
  source 1..110: mol_type = other DNA
tctacaatgtccttatttcccccaccccttttttctttttcagccacgcctgaggcatatggaagttccagggccagggatcaaatctgagctggagcagtgacaccaga

SEQ ID NO: 69608 - DNA, 110 bp, synthetic construct
  source 1..110: mol_type = other DNA
tgccttctttaggcgtcaagcatgttgcctaggccgtgtccatggtcagtggtgtttttattttattataatgtaatgattgcaggcagttgtgggtaaatggcttagct

SEQ ID NO: 69609 - DNA, 110 bp, synthetic construct
  source 1..110: mol_type = other DNA
ttttattttattataatgtaatgattgcaggcagttgtgggtaaatggcttagctaagtgcttttgaatcccatacccagtctctgattatacttgtgtcccatcttgat

SEQ ID NO: 69610 - DNA, 110 bp, synthetic construct; identical to SEQ ID NO: 69608
  source 1..110: mol_type = other DNA

SEQ ID NO: 69611 - DNA, 110 bp, synthetic construct; identical to SEQ ID NO: 69609
  source 1..110: mol_type = other DNA

SEQ ID NO: 69612 - DNA, 110 bp, synthetic construct
  source 1..110: mol_type = other DNA
cttgagcttgtggtttcctttttgccacctttgacttttgcatccaagctaccacctccctgccctttcacctccactctgtctgtgtcacattctctctgtctcacaca

SEQ ID NO: 69613 - DNA, 110 bp, synthetic construct
  source 1..110: mol_type = other DNA
cagataaaagcgtagccatggatatgaagagatgtgtacaagagtgttcattccgcatttaaaataatagctaactgttgaaagcaatctgtatacccatcaaaaggtga

SEQ ID NO: 69614 - DNA, 110 bp, synthetic construct
  source 1..110: mol_type = other DNA
aaggttagaggggaacagaaatgggcaaacaggaaaggggcaaaagctgctttcaggacacatgtgcctggggaaccatgagagaagttctctttgtccatctggagccg

SEQ ID NO: 69615 - DNA, 110 bp, synthetic construct
  source 1..110: mol_type = other DNA
tcctcgtgcccgcgcagacgtttggttgtggccataccaaggctagccgtacaggttcagacgtgcagaggatgctccaagtgtgtgctgacacacacctcttgggaaca

SEQ ID NO: 69616 - DNA, 110 bp, synthetic construct
  source 1..110: mol_type = other DNA
atacatcggcaccagtgcagtctcagagacacagactctgggatgaagcagaaagaacagctttattgctctgccaggcaacggaggccacagcaggataatgcctcaaa

SEQ ID NO: 69617 - DNA, 110 bp, synthetic construct
  source 1..110: mol_type = other DNA
aacagctttattgctctgccaggcaacggaggccacagcaggataatgcctcaaagctgtgtcctcccccgagaggggatagcaagacgttttttatagatttagcgtga

SEQ ID NO: 69618 - DNA, 110 bp, synthetic construct
  source 1..110: mol_type = other DNA
tgccaggtgccactggtgtttgagggggatttcagaggcagcccccaggggtgccgggtgcaggaacttgatgctctgagcccgaggtctgggcatgaggcctgatggcc

SEQ ID NO: 69619 - DNA, 110 bp, synthetic construct
  source 1..110: mol_type = other DNA
gggtgcaggaacttgatgctctgagcccgaggtctgggcatgaggcctgatggcctgttcttttggtatctcctggtccttctgagtttgatgatatctgtttgtgtttt

SEQ ID NO: 69620 - DNA, 110 bp, synthetic construct
  source 1..110: mol_type = other DNA
ctgcagagccctgaagaatgccccttcttccaattctcatccctcccgaacctcagaatgtgacctgacttgtaaaatagggcctttgcagatgtaaccagctacggatc

SEQ ID NO: 69621 - DNA, 110 bp, synthetic construct
  source 1..110: mol_type = other DNA
gaatgtgacctgacttgtaaaatagggcctttgcagatgtaaccagctacggatctcaaaatgagattattctgagtagcggtgggtctgaagtcccatgcctggtttct

SEQ ID NO: 69622 - DNA, 110 bp, synthetic construct
  source 1..110: mol_type = other DNA
ctaggtggagaggccaggctctgaactttaggaagcccagtctctcataagatgcaagaagataagatacacagctgacccttgaacaatgtgggtttgaacagcgaggg

SEQ ID NO: 69623 - DNA, 110 bp, synthetic construct
  source 1..110: mol_type = other DNA
agaaaagtgaagatgtgaccccttagttatggtcactggtaagctcactttcacggacaacctgccacaacgtggcatttggacactgagtcaatgtgtaaaaacataaa

SEQ ID NO: 69624 - DNA, 110 bp, synthetic construct
  source 1..110: mol_type = other DNA
gggtgcaaaagaagttcagcttgtttctggttgatatgattgaccattaaaatcaggataactggagttcctgtcgtggctcagcagtcagcaaaccaaactagcatcca

SEQ ID NO: 69625 - DNA, 110 bp, synthetic construct
  source 1..110: mol_type = other DNA
tttaacgcaaagtgtggtttctgaaagaaattgaattttccccatatgactactcctggccatatcaacattttaaaaagcgggatacacagagttctcatcgtggcgca

SEQ ID NO: 69626 - DNA, 110 bp, synthetic construct
  source 1..110: mol_type = other DNA
catcatagtcagattcgcttctgctgtgccacaaagggaactccaacacacacgatttctaatgcatgaccagagctgtctcataatgacctcacttcagcagaagcagc

SEQ ID NO: 69627 - DNA, 110 bp, synthetic construct
  source 1..110: mol_type = other DNA
tcaggcatttttattaagactgtttggggttggacgttctttttttccttcttctcttttgtttccggagagagggcgctgggaggaggggacccggccggctggctggt

SEQ ID NO: 69628 - DNA, 110 bp, synthetic construct
  source 1..110: mol_type = other DNA
ctcccctgttcaaaggtaacttgctcctaatgatgataaactcctgccactgcctagccctagcagtgctgaggaggccagctgatcctccaaaagagtacgtttcagtc

SEQ ID NO: 69629 - DNA, 110 bp, synthetic construct
  source 1..110: mol_type = other DNA
agggatcaaggagcaaacagtggaggcttggagggtctgcctgcaagagctcagtcacatggccactgctaggtgcaaaggacgatgggaagtgccatcctgctggttgc

SEQ ID NO: 69630 - DNA, 110 bp, synthetic construct
  source 1..110: mol_type = other DNA
cacatggccactgctaggtgcaaaggacgatgggaagtgccatcctgctggttgcccaaaggaggggagagtggattttgatgggcagctaatggtgtctgtccatcact

SEQ ID NO: 69631 - DNA, 110 bp, synthetic construct
  source 1..110: mol_type = other DNA
gggctgggacatggcccggggggagtcgtgcacagcagtctgttggaggaggtgatggagatgacaggatcgccagctgacctgagagctggcctgggcgtcggaggtcc

SEQ ID NO: 69632 - DNA, 110 bp, synthetic construct
  source 1..110: mol_type = other DNA
tggagatgacaggatcgccagctgacctgagagctggcctgggcgtcggaggtccctgcctggtcctcaggatgtccactctgcccactgtgcccactgtgggagccgtt

SEQ ID NO: 69633 - DNA, 110 bp, synthetic construct
  source 1..110: mol_type = other DNA
aaattgacataggactcttccatgggaaggaggaacacgagcgcactgccaccgtggccgatgcgggctgtgcggccacagcgatgcacgaaggcactgtgaacaacaca

SEQ ID NO: 69634 - DNA, 110 bp, synthetic construct
  source 1..110: mol_type = other DNA
cagtgagaggggcaagaggcctgtcaaagggcattttccgtccagctgagaaacatttgtgtgacaatgtcagcagcacaccagccaaggacattggacacgatgagctg

SEQ ID NO: 69635 - DNA, 110 bp, synthetic construct
  source 1..110: mol_type = other DNA
tttgtgtgacaatgtcagcagcacaccagccaaggacattggacacgatgagctgggatcaggcaaagctgcactatgggtgcattttttttttttttttaagggctgca

SEQ ID NO: 69636 - DNA, 110 bp, synthetic construct
  source 1..110: mol_type = other DNA
gcaggcggtctcctcgagggcttcgtgtttgtaaccatggcgagggtcatccagaggggagttcgtgcctgttttccttcttaaccaactttatcttctgccacactcac

SEQ ID NO: 69637 - DNA, 110 bp, synthetic construct
  source 1..110: mol_type = other DNA
ctccacaggtaaacccctctctgttagatggaacggtggtataaacgccaagttttgtcagataatgaagcaggtacacaagctcttataatctaaggaaaaaataagaa

SEQ ID NO: 69638 - DNA, 110 bp, synthetic construct
  source 1..110: mol_type = other DNA
agtagtcagctttgcatgagcccttagtacctaaaaagaaataacttgataggctgaatgatgtgtgcaataatataaaaataaaaaacacccaaaattagccattctgt

SEQ ID NO: 69639 - DNA, 110 bp, synthetic construct
  source 1..110: mol_type = other DNA
tttttttcccccttagcactgttttactctcaccacagactattacctagtagaaaggcctaacagctcttcaacaggaattgatggggttgaggtcccagcctcctcag

SEQ ID NO: 69640 - DNA, 110 bp, synthetic construct
  source 1..110: mol_type = other DNA
aggcctaacagctcttcaacaggaattgatggggttgaggtcccagcctcctcagcaggaaatgccagcaaaggactaatcgcttacccctggaggcagcgctcaggcac

SEQ ID NO: 69641 - DNA, 110 bp, synthetic construct
  source 1..110: mol_type = other DNA
atggttcctagtcggattccttaatcactgtgctacgatgggaactcccccaaactaattttaagtcaatggatttcacataaaaattcacatttctagcttcccttgaa

SEQ ID NO: 69642 - DNA, 110 bp, synthetic construct
  source 1..110: mol_type = other DNA
taattttaagtcaatggatttcacataaaaattcacatttctagcttcccttgaacaaaatctggccacactatgcccacatcacatgggcgataactgtttggagctga

SEQ ID NO: 69643 - DNA, 110 bp, synthetic construct
  source 1..110: mol_type = other DNA
tgctctactttcctacttttccctaattttttaaatgaattttctttctttagaaagatgtaatgtttagatctagctgcaggtgatagaatcacccctgtagatgaatt

SEQ ID NO: 69644 - DNA, 110 bp, synthetic construct
  source 1..110: mol_type = other DNA
ttatctgtccttttgtcattgagatgtaagagctgagaataaatctttttttttccagctaaaaggggagtttattaatttatatagacacagagtatagaggaggaact

SEQ ID NO: 69645 - DNA, 110 bp, synthetic construct
  source 1..110: mol_type = other DNA
cagctaaaaggggagtttattaatttatatagacacagagtatagaggaggaactgagttttgggactcaagtgtgtgataagggaaaggatgaacttttaaacagggtg

SEQ ID NO: 69646 - DNA, 110 bp, synthetic construct
  source 1..110: mol_type = other DNA
ctgagccacgacgggaactccagagagctgaacttttaattgaagataagctttttagaggcaaggcactgcagaagacaaggtacagtcagcatactgtatgaggttta

SEQ ID NO: 69647 - DNA, 110 bp, synthetic construct
  source 1..110: mol_type = other DNA
attgaactgaaagtttttgttaactcgccagcaccttctggagggctagcctgggtccagctcaccaccataagctgtcctagcaccccaatatatatatcattatgaac

SEQ ID NO: 69648 - DNA, 110 bp, synthetic construct
  source 1..110: mol_type = other DNA
tccagctcaccaccataagctgtcctagcaccccaatatatatatcattatgaacacctactgtgtgccagtcactatgcaggatgctgggctacattgtattaaggaag

SEQ ID NO: 69649 - DNA, 110 bp, synthetic construct
  source 1..110: mol_type = other DNA
gtgctgggcctgtcccagggcagtgtgagtgacatgctgtcccggccgaagccgtggagcaagctgacacagaaggggcgggagcccttcatccgcatgcagctgtggct

SEQ ID NO: 69650 - DNA, 110 bp, synthetic construct
  source 1..110: mol_type = other DNA
tgggtctctcaagtcttagggagactcctaaggggactgggaacctttctcctaagacaggtggccaagccctacctacactccctgcctggattgtggacctgagcctc

SEQ ID NO: 69651 - DNA, 110 bp, synthetic construct
  source 1..110: mol_type = other DNA
cagtagagaaatggttatctaaattacggtctgtccagatcataggatactcaagtactcaaagaatatggaaactgtcaaaataatgtagcaaatctgtatgtaccata

SEQ ID NO: 69652 - DNA, 110 bp, synthetic construct
  source 1..110: mol_type = other DNA
tcctttgtaaagccaggtttcccccactggggaacacgtgcatgtttcacaaattcatcttgcttgtcactgcagccagccgaagttccctggaccactgcttcacattc

SEQ ID NO: 69653 - DNA, 110 bp, synthetic construct
  source 1..110: mol_type = other DNA
catcttgcttgtcactgcagccagccgaagttccctggaccactgcttcacattccccacgaggcgctgctccttccacttcagctccccgcctgctacctccagctgct

SEQ ID NO: 69654 - DNA, 110 bp, synthetic construct; identical to SEQ ID NO: 69652
  source 1..110: mol_type = other DNA

SEQ ID NO: 69655 - DNA, 110 bp, synthetic construct; identical to SEQ ID NO: 69653
  source 1..110: mol_type = other DNA

SEQ ID NO: 69656 - DNA, 110 bp, synthetic construct
  source 1..110: mol_type = other DNA
aggagggtgagggaacccaggagaacagctctgccacatggctcgcagtctccagttttatgggaatgaggtagtttctgggctgtctctggccaatcgtcttactcggc

SEQ ID NO: 69657 - DNA, 110 bp, synthetic construct
  source 1..110: mol_type = other DNA
ttttatgggaatgaggtagtttctgggctgtctctggccaatcgtcttactcggcctatacgtgatctgacttcaggtcctttttggtggcaggtgcagctttcagccaa

SEQ ID NO: 69658 - DNA, 110 bp, synthetic construct
  source 1..110: mol_type = other DNA
cagtctccagttttatgggaatgaggtagtttctgggctgtctctggccaatcgtcttactcggcctatacgtgatctgacttcaggtcctttttggtggcaggtgcagc

SEQ ID NO: 69659 - DNA, 110 bp, synthetic construct; identical to SEQ ID NO: 69658
  source 1..110: mol_type = other DNA

SEQ ID NO: 69660 - DNA, 110 bp, synthetic construct
  source 1..110: mol_type = other DNA
aaagctagggatttaggccttatgtaattttttaagttgaggggaggggaggcattaagtcttcaactgcacccccaccccctgccaaaaatcaagattttccccattca

SEQ ID NO: 69661 - DNA, 110 bp, synthetic construct
  source 1..110: mol_type = other DNA
tccttttattatcgccaagtttagtttctgatactaactagcctttctttcttcgagttggggcttccagtgtctgagtgctgtgaactcccagtcagatggcccagcat

SEQ ID NO: 69662 - DNA, 110 bp, synthetic construct
  source 1..110: mol_type = other DNA
agttggggcttccagtgtctgagtgctgtgaactcccagtcagatggcccagcatctgcatttttcatttttcccaaggcaactctatgtctgtatttatttactcagcc

SEQ ID NO: 69663 - DNA, 110 bp, synthetic construct; identical to SEQ ID NO: 69661
  source 1..110: mol_type = other DNA

SEQ ID NO: 69664 - DNA, 110 bp, synthetic construct; identical to SEQ ID NO: 69662
  source 1..110: mol_type = other DNA

SEQ ID NO: 69665 - DNA, 110 bp, synthetic construct
  source 1..110: mol_type = other DNA
aaaaagatatactaagcaattaattcgtgtgcattttgcagagcttgtgaacctcagtacttaatagggccaggcaggaaattcaaatggacaagaatggcctggtgtaa

SEQ ID NO: 69666 - DNA, 110 bp, synthetic construct
  source 1..110: mol_type = other DNA
caattaaaaggcaagttcatgttgactctgagtactaggtacaaagacttcaagtccaactttgcagacagttgtaccaagaccttagcattcggcctctacctgccata

SEQ ID NO: 69667 - DNA, 110 bp, synthetic construct
  source 1..110: mol_type = other DNA
ccaactttgcagacagttgtaccaagaccttagcattcggcctctacctgccatacacagaggttgaaagctggtagcacaagggccagatctggcccccagaaatgttt

SEQ ID NO: 69668 - DNA, 110 bp, synthetic construct
  source 1..110: mol_type = other DNA
aagcaccagtaaccatatccccttgaagacctaacccccagaatctcaaatgcgactatatttggaaacacattctttaaagaggtcattagtatgggtcattagtatga

SEQ ID NO: 69669 - DNA, 110 bp, synthetic construct
  source 1..110: mol_type = other DNA
atgactgaatacaaatggatccctatgttgacgtcacattttcttccttctgctgaatctgatttctagcagctaggatattaaacctcacaaatggaggttttttgttt

SEQ ID NO: 69670 - DNA, 110 bp, synthetic construct
  source 1..110: mol_type = other DNA
actgttttttcatgctgtccatcatatttctgggggactcttgttatatattcacttagttataattcagttaagtgtgttaaatctgcccttttggaaagtgtaacagt

SEQ ID NO: 69671 - DNA, 110 bp, synthetic construct
  source 1..110: mol_type = other DNA
ttaaagtatgcctaataatagaggacgtaagacatttaaaaacaattaaaagaggccagggcagttcaggagaatacttcttagattcctttacagagatctatctagat

SEQ ID NO: 69672 - DNA, 110 bp, synthetic construct
  source 1..110: mol_type = other DNA
gcaagaatgtttagagcagctttatccataatagctaaatttggaaacccaaatttccatccacagacgaatggaaaaataaatattgtatattcaaactgttgaatagt

SEQ ID NO: 69673 - DNA, 110 bp, synthetic construct; identical to SEQ ID NO: 69672
  source 1..110: mol_type = other DNA

SEQ ID NO: 69674 - DNA, 110 bp, synthetic construct
  source 1..110: mol_type = other DNA
gttcctttgcaatcctgttccaactatgacatggaatcatggacccagatgctgcccaatctgctggcccagcttggcttcactagtaacccaagatcacccaggaagat

SEQ ID NO: 69675 - DNA, 110 bp, synthetic construct
  source 1..110: mol_type = other DNA
ccaatctgctggcccagcttggcttcactagtaacccaagatcacccaggaagatcaaagaaaacccatccttgtccagccagagattgctcaagaggccagtgactttt

SEQ ID NO: 69676 - DNA, 110 bp, synthetic construct
  source 1..110: mol_type = other DNA
atacaaggactgacttcccaaaatcagaccaaatttgagtaaactttgttaaatgtattccaccaacattactcagctatggggggaaagacatggtaataatgaatgag

SEQ ID NO: 69677 - DNA, 110 bp, synthetic construct
  source 1..110: mol_type = other DNA
atactgagaataaagactacattacccagcttcccttgcagttgggcctgtcatatgactccagtctgaccaatggttatacccttaaatggaagggtcatgcctcttct

SEQ ID NO: 69678 - DNA, 110 bp, synthetic construct
  source 1..110: mol_type = other DNA
gattgtttgtgctacttcccatctgattccacccctctgcccagcaacggggaaacaggaggcctcccagccagaaactcaggtgatgccaacgccattctggcaccact

SEQ ID NO: 69679 - DNA, 110 bp, synthetic construct
  source 1..110: mol_type = other DNA
caggaggcctcccagccagaaactcaggtgatgccaacgccattctggcaccactcacagctcactccgtagtcctgggaaaatgacggaactccccagcacattcattt

SEQ ID NO: 69680 - DNA, 110 bp, synthetic construct
  source 1..110: mol_type = other DNA
agacagtagggataggaaacagacccacaaggcaggaggtctgggaacatctcacccttaacccagcagccagctgctcacacgcccccttgtcaaagggtatacttctc

SEQ ID NO: 69681 - DNA, 110 bp, synthetic construct
  source 1..110: mol_type = other DNA
ccttaacccagcagccagctgctcacacgcccccttgtcaaagggtatacttctccctaccttctggtcccaattctttctgttggtggactgcacccccattcttcctc

SEQ ID NO: 69682 - DNA, 110 bp, synthetic construct
  source 1..110: mol_type = other DNA
gtagcctgaggtcacgtgcccagcttctgcggaacccgggcaatctataaatcagtggtatgaaggcccttggatagcaggggaggaaggcaggccacagaagcagggtt

SEQ ID NO: 69683 - DNA, 110 bp, synthetic construct
  source 1..110: mol_type = other DNA
gggctttgggggccacacctgtggcatgcagaagttcctgggccagggatccatccctcagcaccttaacttgctgagccacaggggaacttccaatttttattttttta

SEQ ID NO: 69684 - DNA, 110 bp, synthetic construct
  source 1..110: mol_type = other DNA
tatacttggcagcaggtatcttgggtggaggtggagctttgggacagtgtgtgtggccggccctcttggctggctggccccacccccagctgtctgcaccccgctttgga

SEQ ID NO: 69685 - DNA, 110 bp, synthetic construct
  source 1..110: mol_type = other DNA
gccggccctcttggctggctggccccacccccagctgtctgcaccccgctttggagctactctgaaggaagttacaggtagcgcgggaccattctggacaatgacatgtg

SEQ ID NO: 69686 - DNA, 110 bp, synthetic construct
  source 1..110: mol_type = other DNA
agtttccttgaaggtagatagccatgaactcaatccttccattctcagctcctgaagtggtttccttggctctccatcattcagaaatgaaagttacttgaggggactga

SEQ ID NO: 69687 - DNA, 110 bp, synthetic construct
  source 1..110: mol_type = other DNA
tatgacagtaaaaaaatgtctccaggtattgccaaatgtcccccagagacggagggggcaccaatatagctaatgttgtatccgtttttggtttgaatatgtatgttgac

SEQ ID NO: 69688 - DNA, 110 bp, synthetic construct
  source 1..110: mol_type = other DNA
gggcaccaatatagctaatgttgtatccgtttttggtttgaatatgtatgttgacaagccactacagcagaagcattctaaacacatcctaccctccaacgagagtacgt

SEQ ID NO: 69689 - DNA, 110 bp, synthetic construct; identical to SEQ ID NO: 69687
  source 1..110: mol_type = other DNA

SEQ ID NO: 69690 - DNA, 110 bp, synthetic construct; identical to SEQ ID NO: 69688
  source 1..110: mol_type = other DNA

SEQ ID NO: 69691 - DNA, 110 bp, synthetic construct
  source 1..110: mol_type = other DNA
tgtaatagaaagctatatagaatggcttagtgcccctaggcttaggtagatttttcatcctagccggcttgagctagcttttatctcttttagtcaatatctgattaatg

SEQ ID NO: 69692 - DNA, 110 bp, synthetic construct
  source 1..110: mol_type = other DNA
catcctagccggcttgagctagcttttatctcttttagtcaatatctgattaatgccatggcaccatgtctgatctgtgctagagtagatttatatcatgactaatcccc

SEQ ID NO: 69693 - DNA, 110 bp, synthetic construct
  source 1..110: mol_type = other DNA
ccttcaaatactcggggattaggaaataaggttccattgcagaaatcaggcgagtctgattgggctcaacatgtgacggttgcgtgtttgatttgggcctcagtgtttgt

SEQ ID NO: 69694 - DNA, 110 bp, synthetic construct
  source 1..110: mol_type = other DNA
ctgattgggctcaacatgtgacggttgcgtgtttgatttgggcctcagtgtttgtatttaaatgatacttttctgtttctgttctgggtctcacgtgtaattggatggcc

SEQ ID NO: 69695 - DNA, 110 bp, synthetic construct; identical to SEQ ID NO: 69693
  source 1..110: mol_type = other DNA

SEQ ID NO: 69696 - DNA, 110 bp, synthetic construct; identical to SEQ ID NO: 69694
  source 1..110: mol_type = other DNA

SEQ ID NO: 69697 - DNA, 110 bp, synthetic construct
  source 1..110: mol_type = other DNA
tgtttctggctttttcaattttgtgagcaagaaaaccggcaacttaaagtatcgataaagacctctaagcccaaaacattcaactcaggagctgggcccagagaagactc

SEQ ID NO: 69698 - DNA, 110 bp, synthetic construct
  source 1..110: mol_type = other DNA
taccctgctctggattataatctaattgagcacagggactgtcagcccctgaactgaacagctactacatggcgggctctgtgctaagccctctatgtggggtgtccctg

SEQ ID NO: 69699 - DNA, 110 bp, synthetic construct
  source 1..110: mol_type = other DNA
atccccaaggtctgcctatatttcggggactttggatgtgttagctcacttctccaagcttgagcttctgggagtgagaaatggagatgagatggagacaacacctacag

SEQ ID NO: 69700 - DNA, 110 bp, synthetic construct
  source 1..110: mol_type = other DNA
atcaagttattacagagtgtggctcactctttcctcctcctgcagctgggcccccgctggctcacgcagcaccacctggctcttccctctggattctcagaccttccctg

SEQ ID NO: 69701 - DNA, 110 bp, synthetic construct
  source 1..110: mol_type = other DNA
taaacattctctgtggaaaatacaggaaagcactcaaagggagaaatactcatgaccccaacttttcaaaatactcacaaagtaatattttatttccttaaaaacggaac

SEQ ID NO: 69702 - DNA, 110 bp, synthetic construct
  source 1..110: mol_type = other DNA
tccaaatccagggtcttgttccccactcaatacaaaccacttaggcacctgtgggttggaattacctgcagtgcccagcttgccccttcattgaatatttattaactcaa

SEQ ID NO: 69703 - DNA, 110 bp, synthetic construct
  source 1..110: mol_type = other DNA
gtgtggagctgagactaaaacccaggtccccatatcccagctcagagtcttctcggcacatcaaggtgttcaatgacatcagagactccccctccatctcagtccccctc

SEQ ID NO: 69704 - DNA, 110 bp, synthetic construct
  source 1..110: mol_type = other DNA
tgggtcacttaacagcattttaatgaagacagttgtgtcaccacctattcccaatcaaaatggttttctctaccgcatgaaaaatctagctctgtaatgttctgaactgt

SEQ ID NO: 69705 - DNA, 110 bp, synthetic construct
  source 1..110: mol_type = other DNA
ggaacttacaggtctggagttgcattgagctctgtcttacctgttacatcgtggctttgatggtccctttggtgttttatgttactcttgtttcactggagtgcatttgg

SEQ ID NO: 69706 - DNA, 110 bp, synthetic construct
  source 1..110: mol_type = other DNA
tttgatggtccctttggtgttttatgttactcttgtttcactggagtgcatttgggctctttgatcctctctgcatgtgaagccatggtctttcacactataaacttggc

SEQ ID NO: 69707 - DNA, 110 bp, synthetic construct
  source 1..110: mol_type = other DNA
ctatgtgatcactgacttgtcatttatcttgtttcggttgtttcatcagaaaaattgagctgtaagaattaaatgaagaaacataggagcaagctctctgtaaattatga

SEQ ID NO: 69708 - DNA, 110 bp, synthetic construct
  source 1..110: mol_type = other DNA
tgcattattaaaatttgaaaacctgtagcctttggtttatgtgataatgagtagcatgaccacaaaaagttgttttgagctatgtttctgtgtgttatttctggctgttt

SEQ ID NO: 69709 - DNA, 110 bp, synthetic construct
  source 1..110: mol_type = other DNA
cactggctgctgtgagatatgtggcaatgctcatgtgagtcacttttaaagcatcatcattctagagtcctgggcattcaccgagctgccctcctcacttcttagtttgt

SEQ ID NO: 69710 - DNA, 110 bp, synthetic construct
  source 1..110: mol_type = other DNA
atcattctagagtcctgggcattcaccgagctgccctcctcacttcttagtttgttgacaagggttttgctgctggtctgccctgaagggctctgcccaggatttggagt

SEQ ID NO: 69711 - DNA, 110 bp, synthetic construct
  source 1..110: mol_type = other DNA
ggtatcctatgtggttttttagggatgcttatttttcctttctctggccagtcgtaagttagaagtggaggcaaaattagggaatccagcagttattgatcaagccctta

SEQ ID NO: 69712 - DNA, 110 bp, synthetic construct
  source 1..110: mol_type = other DNA
ggcggtgctcctttggctggttcctgggcctcactgggttccattgtgttctcagggtccttgctctggcatgccaagagggctagtcccctacagatcattcagtatgc

SEQ ID NO: 69713 - DNA, 110 bp, synthetic construct
  source 1..110: mol_type = other DNA
ggtccttgctctggcatgccaagagggctagtcccctacagatcattcagtatgctggcaccagcgaggtcacctctccctgtgtcccaggggttgtaccctggtgacaa

SEQ ID NO: 69714 - DNA, 110 bp, synthetic construct
  source 1..110: mol_type = other DNA
aaagtagggttctgataggtgctaggaggggtgttccagctcccatgtggtcctcatgaaagttgaggtgagggctggcctcactaactgtgcaattacgaaattcctca

SEQ ID NO: 69715 - DNA, 110 bp, synthetic construct
  source 1..110: mol_type = other DNA
tatatacccataaacctggggaaaaaatttaaatttttaaaaagaaaattctatccttacacacactttttttcagagctcatcacacaaagcctatcctaagccaatga

SEQ ID NO: 69716 - DNA, 110 bp, synthetic construct
  source 1..110: mol_type = other DNA
cttacacacactttttttcagagctcatcacacaaagcctatcctaagccaatgaatgagaacatggtaattccattggccatggcaatgggttcagaggtgtgcatgtg

SEQ ID NO: 69717 - DNA, 110 bp, synthetic construct
  source 1..110: mol_type = other DNA
gaccagccccgtgtgctctatgcccagacctggccgagggagggacatgagaggctgtgaggatagggtccctccttgtgggtttatcatctcatttagagagatgagag

SEQ ID NO: 69718 - DNA, 110 bp, synthetic construct
  source 1..110: mol_type = other DNA
cagcagatcagggacacctctcgagggagtcctaactaatcgaaggtgcctcttgctccctcttggcagatccgagtccacacctgaatagcttatcttcaaaaccagat

SEQ ID NO: 69719 - DNA, 110 bp, synthetic construct
  source 1..110: mol_type = other DNA
ctccctcttggcagatccgagtccacacctgaatagcttatcttcaaaaccagatcctgaagccgtcccttgcttgggtccctgggcttccggaaaccaggaggttattc

SEQ ID NO: 69720 - DNA, 110 bp, synthetic construct
  source 1..110: mol_type = other DNA
atcctaaaatgcaaccaaatgcatgtttccctggcagctgttctttccattcccaggaacagcacagagtttaggggaaaaaactgagtatgcatgggtgatgttaatga

SEQ ID NO: 69721 - DNA, 110 bp, synthetic construct
  source 1..110: mol_type = other DNA
gaatgagagacagtccctttctcataaaatctcccagactttgtcttggcttagccagctcttgttctccttcttcttcttttcttctcctcttcctgttctctatttcc

SEQ ID NO: 69722 - DNA, 110 bp, synthetic construct
  source 1..110: mol_type = other DNA
cttacagggatcccatgatggagactctacacttgtccccatttctgagggcgaagacactgatgctcagagacgttaagtcacttatcaagtgtcacacagctggtaca

SEQ ID NO: 69723 - DNA, 110 bp, synthetic construct
  source 1..110: mol_type = other DNA
gacactgatgctcagagacgttaagtcacttatcaagtgtcacacagctggtacatattggaactgggagttataccctggtaatctgcccccagaatgtgcgctctcag

SEQ ID NO: 69724 - DNA, 110 bp, synthetic construct
  source 1..110: mol_type = other DNA
aaccgaggctcagcgagatgaagggacagatctaaggcctaccatgaacttcgctgaccccccacggggaagctgcggtacaggtgggtcaggaccgcgtggcgaggagc

SEQ ID NO: 69725 - DNA, 110 bp, synthetic construct
  source 1..110: mol_type = other DNA
atcagagctgcctggtggggcagtgtatatcctgcgacctggttggtggtgccggaggtttccagggagctgtcacctcgacccccacccccaccctcagccctgctctc

SEQ ID NO: 69726 - DNA, 110 bp, synthetic construct
  source 1..110: mol_type = other DNA
aaggaggcagacaaggtccccactttcccaaagctcacagtgtttctggacttaccctctgctgagggtctagcagagaaggagcagcttcagggtcagacattctgtct

SEQ ID NO: 69727 - DNA, 110 bp, synthetic construct
  source 1..110: mol_type = other DNA
tggaagagggaagatggtgataacagtgtgatgatgggctaaagcactaaaacatcacaagcaaatacgtgctcccagctgtgtgctgggcactgggctcagagagctcc

SEQ ID NO: 69728 - DNA, 110 bp, synthetic construct
  source 1..110: mol_type = other DNA
atgcccactgtctaggggacagcagtctccagtttgtctcccagtaagtggacggtagctcccaattcatgtaagatatcccttcctagctggggtataggaaggaatgg

SEQ ID NO: 69729 - DNA, 110 bp, synthetic construct
  source 1..110: mol_type = other DNA
ttctgctgtaggagctgtggggttaggtcagactctagcttggacccgcccgcgtgggtacatgcccacaaatgctaaagccagacttgtcttagctacaggagcagttg

SEQ ID NO: 69730 - DNA, 110 bp, synthetic construct
  source 1..110: mol_type = other DNA
ctataatgattatcataaaccacattttttttataagcaaggaaacagcagcacggagaggttaggaaatttggcaaaggtcatacagctggtaagtggcagagtcagga

SEQ ID NO: 69731 - DNA, 110 bp, synthetic construct
  source 1..110: mol_type = other DNA
tggaaagaaccatctctgatgtgcaagtacaaagagaagctgagggtggatcagactttgagaaaaagtctggtaaactagccctcacactaagcacaaggtaacactag

SEQ ID NO: 69732 - DNA, 110 bp, synthetic construct
  source 1..110: mol_type = other DNA
ctcactgcatttgtttaaactctaaaacccggccagtcccaagccaggcccccactgaacaccaaactcctactgcctagagcttttctgttcacatttgctactatgga

SEQ ID NO: 69733 - DNA, 110 bp, synthetic construct
  source 1..110: mol_type = other DNA
tccagaaccctcagctctcctcacacctctgacccacagctgatctctggcccgtaagacctgagaagttgagaagttgacattccaaagcaacaaggtgccgagcacat

SEQ ID NO: 69734 - DNA, 110 bp, synthetic construct
  source 1..110: mol_type = other DNA
ttatttatcctgcttttggtctcttgatgtctatgaacaaaacctaccttcctaaagttgttggaaagtatgggccaggtgacggggcactgacagctgtgagctctgtg

SEQ ID NO: 69735 - DNA, 110 bp, synthetic construct
  source 1..110: mol_type = other DNA
agttgttggaaagtatgggccaggtgacggggcactgacagctgtgagctctgtgattcctgttgttatcaatgtgttctgttgtaaatctctggtctgtaaagaggtga

SEQ ID NO: 69736 - DNA, 110 bp, synthetic construct
  source 1..110: mol_type = other DNA
acatctaaatcatttatcaaagtgtagaggaagcactcccatttccccactgaaccctgggcagtaccagctgacccctcactgcaacttcttaacctccctgggcctca

SEQ ID NO: 69737 - DNA, 110 bp, synthetic construct
  source 1..110: mol_type = other DNA
cctgggcagtaccagctgacccctcactgcaacttcttaacctccctgggcctcagtttcctcatgaaattgagggcgggggtagggcttgccagggagacagatttgga

SEQ ID NO: 69738 - DNA, 110 bp, synthetic construct
  source 1..110: mol_type = other DNA
ccacaggttattgataggtcatactttgaattctcccaatgcctctaactacagtacatctttctgtgctatgtactgatgtgactgagcttaacaaagcccctggaaca

SEQ ID NO: 69739 - DNA, 110 bp, synthetic construct
  source 1..110: mol_type = other DNA
acatctttctgtgctatgtactgatgtgactgagcttaacaaagcccctggaacacttgagaatatgactttcacagaaatctggctttctggtatatctttcccaggtg

SEQ ID NO: 69740 - DNA, 110 bp, synthetic construct; identical to SEQ ID NO: 69738
  source 1..110: mol_type = other DNA

SEQ ID NO: 69741 - DNA, 110 bp, synthetic construct; identical to SEQ ID NO: 69739
  source 1..110: mol_type = other DNA

SEQ ID NO: 69742 - DNA, 110 bp, synthetic construct
  source 1..110: mol_type = other DNA
ttcttgtacgcactgccccatcacagctgcctaaagtgaggtcatccagacattcaggggtctggcccgagactggtgatgaggcacaggaggccacctccggccctgac

SEQ ID NO: 69743 - DNA, 110 bp, synthetic construct
  source 1..110: mol_type = other DNA
aaggagaggtaaattcattttaaatgtaaccctcgaacaagatctggtttattgaggttttaactctttgctgctgccaaacgagatatttcaaagaaagtttttccaag

SEQ ID NO: 69744 - DNA, 110 bp, synthetic construct
  source 1..110: mol_type = other DNA
ggttttaactctttgctgctgccaaacgagatatttcaaagaaagtttttccaagctatttaccaccaggctgatgtctttgggcaacctcctaggcaatggtcacaggt

SEQ ID NO: 69745 - DNA, 110 bp, synthetic construct
  source 1..110: mol_type = other DNA
ggcttagttaacacggctcaagttggatctaggatcagggctagggtttagtttggctctgtgctctgttctgagctccaataaagaagtttctggaggcctgggagcta

SEQ ID NO: 69746 - DNA, 110 bp, synthetic construct
  source 1..110: mol_type = other DNA
gctctgtgctctgttctgagctccaataaagaagtttctggaggcctgggagctaaggacaggtcagcatgcaaaaaacgagggctcccccagcaagcttacatccctgc

SEQ ID NO: 69747 - DNA, 110 bp, synthetic construct
  source 1..110: mol_type = other DNA
tccatctgccttctgctcaagagtgtcagctgttgggttcatgattttaacattggagaacctaagagtaggaaactggtccaacaatttttcaggacttggaatgttgg

SEQ ID NO: 69748 - DNA, 110 bp, synthetic construct
  source 1..110: mol_type = other DNA
ttactactctgggcaagagattccattgttctaaagctcaggttcctcacaaaagtattcctaaatgataggctacacttcatagcactgttggaaacactgaatgaggt

SEQ ID NO: 69749 - DNA, 110 bp, synthetic construct
  source 1..110: mol_type = other DNA
ggggcgggagatctttgtcctctgtcctgcagcttctctcctactcgtccggcagttctcgtttatgcccacgttttatacagacttatggcaactgacactgtttgtgt

SEQ ID NO: 69750 - DNA, 110 bp, synthetic construct
  source 1..110: mol_type = other DNA
gaggatgcactgagggagaatgagccgggcgcctgcttcctgtttcttgtggggaccaagaaggaccttctggtgagcagaatggacggaacagggcctggggcagcatc

SEQ ID NO: 69751 - DNA, 110 bp, synthetic construct
  source 1..110: mol_type = other DNA
ccaagaaggaccttctggtgagcagaatggacggaacagggcctggggcagcatccccttcagactgggctggagggacagagggtgacaccaaggggcctaagtgggga

SEQ ID NO: 69752 - DNA, 110 bp, synthetic construct
  source 1..110: mol_type = other DNA
tatgcatgtggccccagagcctggagggagcagaaagctctttgtctctggcctgacatatctcctacccccatggagctgcccagtcaccaagtacagcctaggggtct

SEQ ID NO: 69753 - DNA, 110 bp, synthetic construct
  source 1..110: mol_type = other DNA
acatatctcctacccccatggagctgcccagtcaccaagtacagcctaggggtctgggtgccagggctggtgcagagcacagtgccctgtgcctcctgttggcacagtct

SEQ ID NO: 69754 - DNA, 110 bp, synthetic construct
  source 1..110: mol_type = other DNA
cctccaccatcaccttcaacacccccttggcaggaccccctgaccctcctctggatgtgctggtggagcaccacacctcaccgggcctcctggtggtcagctggcttcct

SEQ ID NO: 69755 - DNA, 110 bp, synthetic construct
  source 1..110: mol_type = other DNA
tgtgctggtggagcaccacacctcaccgggcctcctggtggtcagctggcttcctgtcaccatcgactcagtcgggtcctccaatggagtccaagtcactggctatgctg

SEQ ID NO: 69756 - DNA, 110 bp, synthetic construct
  source 1..110: mol_type = other DNA
tggtaagaatttgagtttgatactttttgaggatttgatttctggagccagatttttttgtttgtatggggtcttgtgtctgctagtctttttgtttgtctgtgttgagc

SEQ ID NO: 69757 - DNA, 110 bp, synthetic construct
  source 1..110: mol_type = other DNA
ttttgtttgtatggggtcttgtgtctgctagtctttttgtttgtctgtgttgagcttaaatcaattaagagtacctgctgggagttctcttgtgtctcagcaggttagga

SEQ ID NO: 69758 - DNA, 110 bp, synthetic construct
  source 1..110: mol_type = other DNA
acttacagcctggcttgtgaggtatccatgtccacatgtgctggttttgttagacatgtgtgtgcctggttgtcatccagtcacccagcttctgagtgacaggcaatggg

SEQ ID NO: 69759 - DNA, 110 bp, synthetic construct
  source 1..110: mol_type = other DNA
ctgtagctgccggtctatgccacaaccacagcaatgccaggtccaagccaaggctaaaacctataccacagctcatcacagccatgccagatcctttacacactgactga

SEQ ID NO: 69760 - DNA, 110 bp, synthetic construct
  source 1..110: mol_type = other DNA
gccgttcttgtctcatgtgcttgttcccgccactggactgcccgcccaccagtacccaggctcttcagggtgatggcgtgcgaacttggcaggttgtaacagtccaagcg

SEQ ID NO: 69761 - DNA, 110 bp, synthetic construct
  source 1..110: mol_type = other DNA
ctggggcaagccagtggttctcacatcataacaaggaaactagagtctgggataaacagagctggggccagcccagagaggtttggtgggttgggcaagagaggaggccc

SEQ ID NO: 69762 - DNA, 110 bp, synthetic construct
  source 1..110: mol_type = other DNA
taggcacaaaagcaaggcaacaggcagtttggaaaggatttcattttttttattatgaacccagctggcataagattcatgtcttctgtaaatcacctacaggctaaaca

SEQ ID NO: 69763 - DNA, 110 bp, synthetic construct
  source 1..110: mol_type = other DNA
aaaacatatgaccaggagttcccgtggtgctgcagatactagaagctgactagtatctatgaggacacaggtttgagccctgattttgtttagtgggtttgcagctttgc

SEQ ID NO: 69764 - DNA, 110 bp, synthetic construct
  source 1..110: mol_type = other DNA
ctgactagtatctatgaggacacaggtttgagccctgattttgtttagtgggtttgcagctttgccatgagctgcaatgtaggtcacagacacatctcagatctggtgtt

SEQ ID NO: 69765 - DNA, 110 bp, synthetic construct
  source 1..110: mol_type = other DNA
ttttcctgaccttggcttctcagtctccaaatggctttgagagctgctaaattgtcttcctttttgaatacctgctgtaatgtgttttcctaacaaaacacttactgaga

SEQ ID NO: 69766 - DNA, 110 bp, synthetic construct
  source 1..110: mol_type = other DNA
cttcctttttgaatacctgctgtaatgtgttttcctaacaaaacacttactgagacacttcttttcttcatttctgaaaaacactgatcagtttcctcccagactaaatc

SEQ ID NO: 69767 - DNA, 110 bp, synthetic construct
  source 1..110: mol_type = other DNA
gtgaagatttcaatatatatttatgtcagtgtatctctttctcctgaacttaatcctgacctgtataatcaggattaagcttcctgtagggtatctctgcctgttcaact

SEQ ID NO: 69768 - DNA, 110 bp, synthetic construct
  source 1..110: mol_type = other DNA
ctgacctgtataatcaggattaagcttcctgtagggtatctctgcctgttcaactctttgacaccatcaggctttgctgtacccagtcacactcccactccaacctccca

SEQ ID NO: 69769 - DNA, 110 bp, synthetic construct
  source 1..110: mol_type = other DNA
ttaaaccatcaggggtattagttcttgacctggatcttggtctcctgcagggctaggtgcacattccctcttgaggggtgataaatactcattgggctgtaagtctactg

SEQ ID NO: 69770 - DNA, 110 bp, synthetic construct
  source 1..110: mol_type = other DNA
tggaatccaggaaaattggttgggggggcctaaagtgttgtttaaaagaaaaatagaaaactaatataaaagatgcaccagcattaaaaacaaccaacatcattgttgtg

SEQ ID NO: 69771 - DNA, 110 bp, synthetic construct
  source 1..110: mol_type = other DNA
ttagaggctcctcagcccctctactgtgcttggaaggtacattctgctcaagattcccatagctggagctgcttcaagggtgtatccttgatagaataaggtatggttga

SEQ ID NO: 69772 - DNA, 110 bp, synthetic construct
  source 1..110: mol_type = other DNA
ttcaaaccccatcacacggctggttttagccaacagctggactctaggtgaaccgctttctgcctgctcaccctccctcccccgctcagtaagctgcagccaccctggcc

SEQ ID NO: 69773 - DNA, 110 bp, synthetic construct
  source 1..110: mol_type = other DNA
ctttctgcctgctcaccctccctcccccgctcagtaagctgcagccaccctggcctcttcctgcctcagagcctttgtccagctatgtgccctgtgtgaaaagttcctgg

SEQ ID NO: 69774 - DNA, 110 bp, synthetic construct
  source 1..110: mol_type = other DNA
gcaacaaaaagcatccaaccagcttttaaacagcttagcaacgttaacagaatggccaccctgcatattcagacacagatttcataggccactaagttattagttactaa

SEQ ID NO: 69775 - DNA, 110 bp, synthetic construct
  source 1..110: mol_type = other DNA
catgctgtcctatgaacatggctcccaaacatagcatcagccccgaccctgtgtccagggcccgctgtgcaattccagctgtacattcaggatctctacctacacatacg

SEQ ID NO: 69776 - DNA, 110 bp, synthetic construct
  source 1..110: mol_type = other DNA
cagggcccgctgtgcaattccagctgtacattcaggatctctacctacacatacgccagcctgcaaatcaatgacttgtcatcctcacctgcaaaccctctccacccact

SEQ ID NO: 69777 - DNA, 110 bp, synthetic construct
  source 1..110: mol_type = other DNA
caagatggatagagaacttgtttaggatatagatgtttttgcaggttcctttcgcagcacagcccagcgaacaccttggtggtagcagcaccgtctcaggcactctggga

SEQ ID NO: 69778 - DNA, 110 bp, synthetic construct
  source 1..110: mol_type = other DNA
tctgacaattaattacatttttaagaaatctgtaggtcaacgatttgcaagccgaacaggttagttctatgggttgtatgaggccacaggccaccaggttgaaattctca

SEQ ID NO: 69779 - DNA, 110 bp, synthetic construct
  source 1..110: mol_type = other DNA
ccaggcctctctctggaccaggtcctctaaagagctcctgctacagccaaatccggattcaacatgcaagcactggaaaagcagagaatcagaatggacccttcagggca

SEQ ID NO: 69780 - DNA, 110 bp, synthetic construct
  source 1..110: mol_type = other DNA
actgtcccaagaagtcatttacgtccagtcatgataaatgaattttctaatctctggattttcttagttggctgctaccatcgcactaatagacagtctccattttctat

SEQ ID NO: 69781 - DNA, 110 bp, synthetic construct
  source 1..110: mol_type = other DNA
ggattttcttagttggctgctaccatcgcactaatagacagtctccattttctatagaataaaactgtaatgactgctgatcattttctagttcaatctctctgcccggc

SEQ ID NO: 69782 - DNA, 110 bp, synthetic construct
  source 1..110: mol_type = other DNA
aagctgggcagagccattttttagcttcctgatatgtttaggaaaaaagaaaaggactgcttgctgcttaaaaactaaacaaagtagacaaaagtatcagaaatactggg

SEQ ID NO: 69783 - DNA, 110 bp, synthetic construct
  source 1..110: mol_type = other DNA
cccaggctgcccaccactgccgcagctccttcttccaaaggcaggagaaaaacggcacctcttgggaggaatgccctgtgagaaaagcattttcctgggagctcccattg

SEQ ID NO: 69784 - DNA, 110 bp, synthetic construct
  source 1..110: mol_type = other DNA
ataacctagtaaagaaagagaatatgcataattgaagtgagtttttaaaatgggttcttctttatcactcttggacagttaaaattgccatgcttgaggaagaaaatgca

SEQ ID NO: 69785 - DNA, 110 bp, synthetic construct
  source 1..110: mol_type = other DNA
tatatttacttaatagaagtttacttattgtccagtacatgctaagctctggtgtaaagtggtgagacaggtgtactcatttgatttttgcctgttttccatgaaaagat

SEQ ID NO: 69786 - DNA, 110 bp, synthetic construct
  source 1..110: mol_type = other DNA
gttcagaagagacgaaggaatgggaggggcggaggggtgtgggcttgggtgataggagagaatcagagcttgctgtgtgctgaggaagtggtccaggccacagagtgagt

SEQ ID NO: 69787 - DNA, 110 bp, synthetic construct
  source 1..110: mol_type = other DNA
cagtgttcatgtctattgaaaggagatggtagtctacccagaattctagaaactgcaaaaccagagctcagttaaaaaaaaaaaaaatcagtgattgccttgggttagtg

SEQ ID NO: 69788 - DNA, 110 bp, synthetic construct
  source 1..110: mol_type = other DNA
tttctcatatcatggtctatcccaagagactgtacagagttccctgtgctgtatagcaggacctctaaatataatagttctagttagttctcacctactagaagaccatg

SEQ ID NO: 69789 - DNA, 110 bp, synthetic construct
  source 1..110: mol_type = other DNA
ctgggaaaaaaggaggcatcagagatggtctgtgaaagggtccagatctcagatgtaatgggcttcaaagctgccattatacgtttgctcaatgaactaaagaaggaagg

SEQ ID NO: 69790 - DNA, 110 bp, synthetic construct
  source 1..110: mol_type = other DNA
taatgggcttcaaagctgccattatacgtttgctcaatgaactaaagaaggaaggtatgaatgatgacaatgctccgtcaaaagagaatgtcagggagttcccgttgtag

SEQ ID NO: 69791 - DNA, 110 bp, synthetic construct
  source 1..110: mol_type = other DNA
caatgaaccctgaatttacaatcaaaaagctactcaataatttgttgttccggtgaaaggttgacatttctggtcaaataggttcttagaggaggaggatgtgaaagaca

SEQ ID NO: 69792 - DNA, 110 bp, synthetic construct
  source 1..110: mol_type = other DNA
cattcctgattaagttccaaccagggagtttgttttttaataaatcgtttgaagaatttatactgtattttagctgggaccttcttgggctgtgtggccactatgccctc

SEQ ID NO: 69793 - DNA, 110 bp, synthetic construct
  source 1..110: mol_type = other DNA
atttatactgtattttagctgggaccttcttgggctgtgtggccactatgccctcatcacatttccctctccagtcatggaactcgctggttattcagcttctgcttttg

SEQ ID NO: 69794 - DNA, 110 bp, synthetic construct
  source 1..110: mol_type = other DNA
gcttgactctctatggtcttatttcctatatcttcccaatagatttacaaaatcaaggttaatgagctgaaatttctcttgagggtagcagctgtgtgtcatggaaatac

SEQ ID NO: 69795 - DNA, 110 bp, synthetic construct
  source 1..110: mol_type = other DNA
gtaaaattatacgcagattttcaactgcacaggaggtccatgcaccaacctccacattgtttacgggccagctgtatatccttttttattttggcttcactatttttctt

SEQ ID NO: 69796 - DNA, 110 bp, synthetic construct
  source 1..110: mol_type = other DNA
aaaggaactgaggacaatggtcagggtttgcttcccctgcagagtgtgaaaccagggcacagagcttcaggagggacggagtgagaagacctccttagatcaagaaagaa

SEQ ID NO: 69797 - DNA, 110 bp, synthetic construct
  source 1..110: mol_type = other DNA
ggcacagagcttcaggagggacggagtgagaagacctccttagatcaagaaagaagaaagaacaactgataccctcccccatgctccagataaagaaaaagaaaaggaac

SEQ ID NO: 69798 - DNA, 110 bp, synthetic construct
  source 1..110: mol_type = other DNA
tgcctctacctattcaagacgcctaaaaccggtgtttctgcctcctctgggtgtcatgaagatcaagcgaaggcagtgccaggcccacgatgaagagaagatcctcagca

SEQ ID NO: 69799 - DNA, 110 bp, synthetic construct
  source 1..110: mol_type = other DNA
ccatctggcctaagaagaagctatagttgacccttgaatgactcgggtttgcattgcaggggtccacttacatgcagatatttttcaataggaaacactacagtaccacg

SEQ ID NO: 69800 - DNA, 110 bp, synthetic construct
  source 1..110: mol_type = other DNA
atgggctgaactctttctgagtcaaacacacaaagcccccccaagacactgccacagtcagagacaaacccaaggttaggttgcttcctcaggagggggaggacaaaagt

SEQ ID NO: 69801 - DNA, 110 bp, synthetic construct
  source 1..110: mol_type = other DNA
caaatactcttattatgagccatttctctaatgatgagaactggcagcatgttctaggttttttgctgggtgctggagctgtgcacagaccggcccctttaatcttccaa

SEQ ID NO: 69802 - DNA, 110 bp, synthetic construct
  source 1..110: mol_type = other DNA
aggttttttgctgggtgctggagctgtgcacagaccggcccctttaatcttccaacaatctaatggggtggggactctggttaccctcaccttctaacagcatcttgagg

SEQ ID NO: 69803 - DNA, 110 bp, synthetic construct; identical to SEQ ID NO: 69801
  source 1..110: mol_type = other DNA

SEQ ID NO: 69804 - DNA, 110 bp, synthetic construct; identical to SEQ ID NO: 69802
  source 1..110: mol_type = other DNA

SEQ ID NO: 69805 - DNA, 110 bp, synthetic construct
  source 1..110: mol_type = other DNA
actctgggaaagacagtagaaatactctcatctggcatgagagagacatgaaatatgtgtgtttaatttttatttttgtaattaatttttttttaggaccaggcctttaa

SEQ ID NO: 69806 - DNA, 110 bp, synthetic construct
  source 1..110: mol_type = other DNA
cgtgaatgtacagagcccagcttagtaagagctttgtggaactggtatgaatgtatcggaggctaacacatcataggtctgctctgacagcagagtgaggcagctcaaat

SEQ ID NO: 69807 - DNA, 110 bp, synthetic construct
  source 1..110: mol_type = other DNA
gcccatgctggcctccagcgtccttggagtccacacgtcttgagcacatgatacaattggcatttttctaaggtctatactttatcagcttgtttaatcccctcaagaac

SEQ ID NO: 69808 - DNA, 110 bp, synthetic construct
  source 1..110: mol_type = other DNA
ccagggcttacaaacaccagagggagggagggagggaggccacacagggattccgtgagttgcgatgggatctgacttttcttcgaaaggacgctggaaccctatcctca

SEQ ID NO: 69809 - DNA, 110 bp, synthetic construct
  source 1..110: mol_type = other DNA
cccaggtgccaggggttgggagcaggtagcagttcgaacgaggccctatgagagctgaggggagggtacccatgacattttctctggactttagtttctccatttaacct

SEQ ID NO: 69810 - DNA, 110 bp, synthetic construct
  source 1..110: mol_type = other DNA
tgaggggagggtacccatgacattttctctggactttagtttctccatttaacctgagaaacttccctgtccgtgaatctcttgttaaaatagggaagagtgaaaggacc

SEQ ID NO: 69811 - DNA, 110 bp, synthetic construct
  source 1..110: mol_type = other DNA
aaagtgataacagccacttggttctaccgtacctacaatgaatatgcattgaaggggctggaggaaatcagtggcaatcactggatacacagccagtgtaccagctctgg

SEQ ID NO: 69812 - DNA, 110 bp, synthetic construct
  source 1..110: mol_type = other DNA
ggctggaggaaatcagtggcaatcactggatacacagccagtgtaccagctctggacatatactctaaatcgttttgacagcctgtcatctgagagccagcagtggcatc

SEQ ID NO: 69813 - DNA, 110 bp, synthetic construct; identical to SEQ ID NO: 69811
  source 1..110: mol_type = other DNA

SEQ ID NO: 69814 - DNA, 110 bp, synthetic construct; identical to SEQ ID NO: 69812
  source 1..110: mol_type = other DNA

SEQ ID NO: 69815 - DNA, 110 bp, synthetic construct
  source 1..110: mol_type = other DNA
aagagtgggatggggacagggagacagggcactgtcgaggggagcccagagagcttccgggagcccagccgaccccatctattagccgcgaccctgcctcctcggtgctg

SEQ ID NO: 69816 - DNA, 110 bp, synthetic construct
  source 1..110: mol_type = other DNA
tccgggagcccagccgaccccatctattagccgcgaccctgcctcctcggtgctgctcggtccccagagccacatgcgctttaaagaggagacaggaagcagtcgacctt

SEQ ID NO: 69817 - DNA, 110 bp, synthetic construct
  source 1..110: mol_type = other DNA
atcaggcatttatggaggatgtctccccagagatgatgctgggggcactggagtgggcacaggggaacctcagggagcccgggccctttagcatcgagacgcagcctcgt

SEQ ID NO: 69818 - DNA, 110 bp, synthetic construct
  source 1..110: mol_type = other DNA
atcaaatcctccagtaaatatgagggtgctgacacttctgtgttttcaacaggcttgatcgcagctgccctgccttttggaagacaaggacatagagtgttcagcatgca

SEQ ID NO: 69819 - DNA, 110 bp, synthetic construct
  source 1..110: mol_type = other DNA
tcctcctgcaaagtctctccatcacccactattgacaaaacctaacatcacactagtgtcaatggaaaaatatttaaagggcctaactccatttttgcacagtaggcaat

SEQ ID NO: 69820 - DNA, 110 bp, synthetic construct
  source 1..110: mol_type = other DNA
ctctgtagcaacccaggttcaatccctggtcctacacagtgggttaaggatccggcattaccacaaaagctctcacatattcctaggagtctaaaaggtcttatgcaagt

SEQ ID NO: 69821 - DNA, 110 bp, synthetic construct
  source 1..110: mol_type = other DNA
cagggaagctgcccaccccaatgtgggtgtctcaccatttcatttattaagtcgatcagcagctatttcttgaacatctactatgttctaagcatcgttctaggcaccag

SEQ ID NO: 69822 - DNA, 110 bp, synthetic construct
  source 1..110: mol_type = other DNA
tcagcagctatttcttgaacatctactatgttctaagcatcgttctaggcaccagggacccagaagagcaaactccctgccctcagaatctggcattatagtgtaaaacc

SEQ ID NO: 69823 - DNA, 110 bp, synthetic construct
  source 1..110: mol_type = other DNA
ctacaaaactagtcatatccacccatgctgttctggccaccgtagccagccccgtaacagccactcacggactggctctcaaggccactgtatgtggactgggttgacac

SEQ ID NO: 69824 - DNA, 110 bp, synthetic construct
  source 1..110: mol_type = other DNA
caactctggcacctgggaactctagaattggctgtatgatgcaatatatgaagttgtttctgcagggcatctccagcttgtcatattttaatgctgctctagcctcaaac

SEQ ID NO: 69825 - DNA, 110 bp, synthetic construct
  source 1..110: mol_type = other DNA
gtttctgcagggcatctccagcttgtcatattttaatgctgctctagcctcaaacttgaatagttttatactgtttgtcaaagagttcccaaatacttacagattcttag

SEQ ID NO: 69826 - DNA, 110 bp, synthetic construct; identical to SEQ ID NO: 69824
  source 1..110: mol_type = other DNA

SEQ ID NO: 69827 - DNA, 110 bp, synthetic construct; identical to SEQ ID NO: 69825
  source 1..110: mol_type = other DNA

SEQ ID NO: 69828 - DNA, 110 bp, synthetic construct
  source 1..110: mol_type = other DNA
tcacttgcatttcatttaattacttaaatctcttagcttttggaccctcttcatgtcatgttagtggggatcctagtggctgatgagaagaaatgcattttcatgagtag

SEQ ID NO: 69829 - DNA, 110 bp, synthetic construct
  source 1..110: mol_type = other DNA
acacaaaccaaatttagctctcattccccaaaccagccgaaaaagctgccacttcatgtgcccagcaagccacatccatgacgatccatctctggtgcatttgctggccc

SEQ ID NO: 69830 - DNA, 110 bp, synthetic construct
  source 1..110: mol_type = other DNA
ttagcatcttcaaaaagaaagcaatcagaagttacctagcctaacatattaacctatcaataaccctatatataacatctttggcagattgctaacctttctacgaccaa

SEQ ID NO: 69831 - DNA, 110 bp, synthetic construct
  source 1..110: mol_type = other DNA
actaagcatttgagactgcaaaagctatcagaaaaagtaggaggtggcagggcggggagttaaataaaattaagagaaaaatttacaaatgcaatggtcacagtcatggt

SEQ ID NO: 69832 - DNA, 110 bp, synthetic construct
  source 1..110: mol_type = other DNA
attctgtacactttaaatttatacagcactgtatgtcaattatatcgcaataaaactaggaggaaaaaattctctttcacacatcaactgctgctcaaatagaggaaaaa

SEQ ID NO: 69833 - DNA, 110 bp, synthetic construct
  source 1..110: mol_type = other DNA
gtgttgccaagacttggtgaccgggccagcgagaccatatcccttagtgcctggcataaatgtcttggtccacattcctttggcacagtcaggatctccaaccagtcagt

SEQ ID NO: 69834 - DNA, 110 bp, synthetic construct
  source 1..110: mol_type = other DNA
aagatgattttgatggaggggtaagggcaccaagtaaatatccatttattgggagtaccatggaaatgcaggccagctccatctctattcagcgtagattccctacatag

SEQ ID NO: 69835 - DNA, 110 bp, synthetic construct
  source 1..110: mol_type = other DNA
caggaagccatgtgtgcagattttgctcttttgagtttgtgatataagtgggtacaaaaatttttaaggcagaatcctacaggggaatacagcaagcagaatggatctat

SEQ ID NO: 69836 - DNA, 110 bp, synthetic construct
  source 1..110: mol_type = other DNA
aaaaatttttaaggcagaatcctacaggggaatacagcaagcagaatggatctattaagcttttgttatttcattttggtactcctggacatggctcttgaggatatact

SEQ ID NO: 69837 - DNA, 110 bp, synthetic construct
  source 1..110: mol_type = other DNA
aaatgatgtgaatcacttccaggccaatgcggttaaaaagtagatcccttctcgcttttctttttgcatcgctcagctcaaagaagataattgtgaggcactacaggttg

SEQ ID NO: 69838 - DNA, 110 bp, synthetic construct
  source 1..110: mol_type = other DNA
agaatgaaaccctccatggcaaagcaggggaaagtcaggatagccagaaatagcggtggaattaaagaggcattggtgctacagctctccagagaagaagccgacaaaaa

SEQ ID NO: 69839 - DNA, 110 bp, synthetic construct
  source 1..110: mol_type = other DNA
catttggaacatgtagaaaactcaggttcaatgaaaacatgtaacagtgaggcaaaagtcagaacagaatgaccggacagttttagaatagaaaaattgggaagtgaaag

SEQ ID NO: 69840 - DNA, 110 bp, synthetic construct
  source 1..110: mol_type = other DNA
catgtcatctgaaaatgacagccctaatataattgcagtaagggtcaaggcacgatgtcacaaattggttgttgtctgccggctctgtctaagattctatccccacagta

SEQ ID NO: 69841 - DNA, 110 bp, synthetic construct
  source 1..110: mol_type = other DNA
ctactcgctaagattctgttcctcaggatctgcattagctcatgaagctctctcagctcagccctgactttccccacgtcctcttcctgtaaggcttcctttggctttta

SEQ ID NO: 69842 - DNA, 110 bp, synthetic construct
  source 1..110: mol_type = other DNA
gctcagccctgactttccccacgtcctcttcctgtaaggcttcctttggcttttacagcaaatgtgaccagcttatccccaagtaattctaattaactctcttgaggtca

SEQ ID NO: 69843 - DNA, 110 bp, synthetic construct
  source 1..110: mol_type = other DNA
ctgatgccccaaggggaaggactgctcgcagtgtactttggtcatgttgctggtctttttcatgctcaggttcccactcaaagctgtaagtttcccaagtctctcggcat

SEQ ID NO: 69844 - DNA, 110 bp, synthetic construct
  source 1..110: mol_type = other DNA
ttgctgccacacagtgattcaagcccaatagcaagctctacaaaatttgtaaaaaaaataaagtctgcacacatatacatgaaatacctcaatttttaaaaagagtattc

SEQ ID NO: 69845 - DNA, 110 bp, synthetic construct
  source 1..110: mol_type = other DNA
tgtggatatacacccagaagtggaattgccaggtcttatggtagttctgtttttgttttttcagatacctgtgtactgttttacacagtagctgtaccaatttacattcc

SEQ ID NO: 69846 - DNA, 110 bp, synthetic construct; identical to SEQ ID NO: 69845
  source 1..110: mol_type = other DNA

SEQ ID NO: 69847 - DNA, 110 bp, synthetic construct
  source 1..110: mol_type = other DNA
cataagaaagcataatagttttaccatttgtcctactaatactgaaaaaggacatttttgcacattaaggggatcttggattattttgtttccggaacatctaataaaat

SEQ ID NO: 69848 - DNA, 110 bp, synthetic construct
  source 1..110: mol_type = other DNA
tcttgaaaattttacattgcgattaaaagtaccaagctgaaccaaatgactactgggattcttgaatactatgcctaaggcaagcctcagaccctgtgacagaatgtttt

SEQ ID NO: 69849 - DNA, 110 bp, synthetic construct
  source 1..110: mol_type = other DNA
gagggaccactaagagtgggagcttgggaagggactctgttggagggaacaacttgtgcagaagtgagaatctggcttggcaactgagtggagttcactgatgctggagc

SEQ ID NO: 69850 - DNA, 110 bp, synthetic construct
  source 1..110: mol_type = other DNA
aagtttttttttctaagtttctttctaaaaaatgctcttcctaaggaggtcttcctgtttcatgggagataatgtgaggcctatttcactgatttctttgaatatgcagc

SEQ ID NO: 69851 - DNA, 110 bp, synthetic construct
  source 1..110: mol_type = other DNA
tgtttcatgggagataatgtgaggcctatttcactgatttctttgaatatgcagcttatatcttacgtaatggtctccactcccccaaatctcacctttattgcatttag

SEQ ID NO: 69852 - DNA, 110 bp, synthetic construct
  source 1..110: mol_type = other DNA
ttaatattcacatctaacaaattgaatcatgctattcaaaagataaatgggagatttataaaataaattaattcatagagcaccataagcacagcatccaggaaggggac

SEQ ID NO: 69853 - DNA, 110 bp, synthetic construct
  source 1..110: mol_type = other DNA
gttggcttaagaaaggtgagatgtgattagctcctgtttctgacccaataagtgcaggatctctgtaaactgtgaaatgctcatttttatcaatgataagagggcttttt

SEQ ID NO: 69854 - DNA, 110 bp, synthetic construct
  source 1..110: mol_type = other DNA
aggatctctgtaaactgtgaaatgctcatttttatcaatgataagagggctttttgtagtttctaatgtactgcctcgagtaggaactggatgaaaactgcaccttgata

SEQ ID NO: 69855 - DNA, 110 bp, synthetic construct; identical to SEQ ID NO: 69853
  source 1..110: mol_type = other DNA

SEQ ID NO: 69856 - DNA, 110 bp, synthetic construct; identical to SEQ ID NO: 69854
  source 1..110: mol_type = other DNA

SEQ ID NO: 69857 - DNA, 110 bp, synthetic construct
  source 1..110: mol_type = other DNA
ttttcagatgagaaaacagttcagtaacctggtaaaaatcacaaagccagaactgacattttaaatgctggtgaggccataattttttttctccgtgatacttactttgg

SEQ ID NO: 69858 - DNA, 110 bp, synthetic construct
  source 1..110: mol_type = other DNA
ataacccaggcaagacaggttgggcttggatgcacaggaagatattaggcctgcgaatagcagtagaagacgatggatgaagggcaagctaatgaggtcagtttggttta

SEQ ID NO: 69859 - DNA, 110 bp, synthetic construct
  source 1..110: mol_type = other DNA
ctgcacagtaatggtccatccactctttttttctgaggacacggaaaaggagctcgggtacctgaaggcgtgcactggccctggactctgccagtgtaggaaacacaccc

SEQ ID NO: 69860 - DNA, 110 bp, synthetic construct
  source 1..110: mol_type = other DNA
gttgctgaactcccaccaacttagctaaatttattcaggtttcaaggagcagaaacctcaggttatctatgtgatggtaatggggggttgtggtggggatacatgagcaa

SEQ ID NO: 69861 - DNA, 110 bp, synthetic construct
  source 1..110: mol_type = other DNA
atggtggaccgagtggacattccaaaaagaggggagggagtgagaagcctttaatatcgaggtccagctcaagggtcaatggtggttgtggcctcttgatgacctccttc

SEQ ID NO: 69862 - DNA, 110 bp, synthetic construct
  source 1..110: mol_type = other DNA
atcgaggtccagctcaagggtcaatggtggttgtggcctcttgatgacctccttcattccagctccatttatttccccattgcattgctctggcacagtaatcatacatc

SEQ ID NO: 69863 - DNA, 110 bp, synthetic construct
  source 1..110: mol_type = other DNA
cagtctcaggggcatgtagtgctgaaataatttcatatagccagaaagaagctggtaggatttaaaggatagtattccattatgaatatccaccaccaatcagttacctg

SEQ ID NO: 69864 - DNA, 110 bp, synthetic construct
  source 1..110: mol_type = other DNA
tacagcacagccacagcaatgccagaactgagccgcatctgcaaactgaaccacagctcgtggcaccatgggatgacttaactactgagtgaggccagggatcgaacccg

SEQ ID NO: 69865 - DNA, 110 bp, synthetic construct; identical to SEQ ID NO: 69864
  source 1..110: mol_type = other DNA

SEQ ID NO: 69866 - DNA, 110 bp, synthetic construct
  source 1..110: mol_type = other DNA
tctaaatctaatttccttccaaaggccccatctccaaacatcctcacagcagaaagtgtgcctctttatttaatttataaattcagtaaggattcatctgttattttcct

SEQ ID NO: 69867 - DNA, 110 bp, synthetic construct
  source 1..110: mol_type = other DNA
ccctgagtattccaatctgtttagtagtattgctattttccttgtaaccaacaaattggactggtagcttatgtgtcagtctctggtgagtcttatgatttggggccaat

SEQ ID NO: 69868 - DNA, 110 bp, synthetic construct
  source 1..110: mol_type = other DNA
ttggactggtagcttatgtgtcagtctctggtgagtcttatgatttggggccaatattttgttactctggagagatgcaatccatattctggaatggcaaactcgaggac

SEQ ID NO: 69869 - DNA, 110 bp, synthetic construct; identical to SEQ ID NO: 69867
  source 1..110: mol_type = other DNA

SEQ ID NO: 69870 - DNA, 110 bp, synthetic construct; identical to SEQ ID NO: 69868
  source 1..110: mol_type = other DNA

SEQ ID NO: 69871 - DNA, 110 bp, synthetic construct
  source 1..110: mol_type = other DNA
ttacatttctttaataattttttttcctgtgcactttggccatctgtgtcttcagaaaaatgcatgtttaaatcttctgcctaatttttgactgagtttttttccttttg

SEQ ID NO: 69872 - DNA, 110 bp, synthetic construct
  source 1..110: mol_type = other DNA
ctctcaagcactgcaccctgacattcagactcagtaaggctatagaaggcacaaaaataatgtacatttaaaaatctccccatgagtccccactctggtgcaatgggatc

SEQ ID NO: 69873 - DNA, 110 bp, synthetic construct
  source 1..110: mol_type = other DNA
aataatgtacatttaaaaatctccccatgagtccccactctggtgcaatgggatctgcagtgtctctgcagctccaaggacacaggttcaattcctggccctacattgtg

SEQ ID NO: 69874 - DNA, 110 bp, synthetic construct
  source 1..110: mol_type = other DNA
ctaggctagcgtagagccagcaaaggcaatttgaaccccatagagcagcactttcatgacaggcagcatccagtgtggagtataagagctatctgatcaaaagaggccct

SEQ ID NO: 69875 - DNA, 110 bp, synthetic construct
  source 1..110: mol_type = other DNA
atgacaggcagcatccagtgtggagtataagagctatctgatcaaaagaggcccttttcctgagcaaatgtgagatggcactattggtaacactctgcaatagctgggga

SEQ ID NO: 69876 - DNA, 110 bp, synthetic construct
  source 1..110: mol_type = other DNA
aaaataggttttaggctgaaagccttgtctctgagactcagctctgtaaaatcagagtggatggttcactgtcaatttcttctggcctccacatttccaaaataagtaaa

SEQ ID NO: 69877 - DNA, 110 bp, synthetic construct
  source 1..110: mol_type = other DNA
atcattgccctatgcatcatgttcatttttttttcctttctggtgggatcaattggaacaatgttcctatccagctgtgagcttatccatcatattcacacattcattag

SEQ ID NO: 69878 - DNA, 110 bp, synthetic construct
  source 1..110: mol_type = other DNA
aatggcaaaaagacaaaaaaaaaaattttttaaataaaatagcaagggtcactgattcagtaacaattacagtgtgtcacactcaagagtatggaaaagtggttatgtag

SEQ ID NO: 69879 - DNA, 110 bp, synthetic construct
  source 1..110: mol_type = other DNA
cttattcccaaagcattttacttttaccttgaccaaaagtagtatacttttttctgcctcaattatattatttgtgtatctgcctcttccactagatggtatggtcccta

SEQ ID NO: 69880 - DNA, 110 bp, synthetic construct
  source 1..110: mol_type = other DNA
gcctcaattatattatttgtgtatctgcctcttccactagatggtatggtccctaaaactctctcttaacttatctgtatttccccacagctctagcctagtgtttcatt

SEQ ID NO: 69881 - DNA, 110 bp, synthetic construct
  source 1..110: mol_type = other DNA
ttaacctaaatcaagtatttgtgatttttttatgtacatcttttcatctcggtgtgagggttatatgtggtaatagtagctgaattctatccaacttttatgctgcactt

SEQ ID NO: 69882 - DNA, 110 bp, synthetic construct; identical to SEQ ID NO: 69881
  source 1..110: mol_type = other DNA

SEQ ID NO: 69883 - DNA, 110 bp, synthetic construct
  source 1..110: mol_type = other DNA
catcttcactgcagagatcccttaacctactgtttgattctcttgcaccatggtgggaactccaatttgagcttaatttaatgtgtaatctttggagacctttgagaaaa

SEQ ID NO: 69884 - DNA, 110 bp, synthetic construct
  source 1..110: mol_type = other DNA
cagctgtaaaattttaaaaaattatgattctactgaacagtgctatttagacaatgtttttttgctgattagctcatgggataattgacctactgaggaccctaacacat

SEQ ID NO: 69885 - DNA, 110 bp, synthetic construct
  source 1..110: mol_type = other DNA
tcgctctctggccctggaacttccacatgctgtgggtgtggtggccaaaaatagctagtgaaaagcaatgcttacacttttagacagcaaggaattgatgcccgttctgt

SEQ ID NO: 69886 - DNA, 110 bp, synthetic construct
  source 1..110: mol_type = other DNA
ttcccatcagcccctgtggccctagcatcaggccctagggtacgtcttggaaccagaccccaaagcagtggtgtgtgaggaaggactcctaggcagaagggtgcgaccgc

SEQ ID NO: 69887 - DNA, 110 bp, synthetic construct
  source 1..110: mol_type = other DNA
gacgtaggcagggaaaccccagtctgggggaggacaggtttcttggaacagtggcggggagctgtgggctgagagctggaaaggcagggagtcaggtgaggaagaggatg

SEQ ID NO: 69888 - DNA, 110 bp, synthetic construct
  source 1..110: mol_type = other DNA
ccttttagagctgccctggatacagcagaggtggccactgctggaggtagcaacccttaggaggggtgggaccctggataaggcagctctgtgcgacgaggcatggctga

SEQ ID NO: 69889 - DNA, 110 bp, synthetic construct
  source 1..110: mol_type = other DNA
tcgctgaagaacgtctacttcctgctcttcgacagcgagagcatcggcatctacgtgcaggagatggccaagctcgatgccaagtagccgccgcgctcgccgccggaaac

SEQ ID NO: 69890 - DNA, 110 bp, synthetic construct
  source 1..110: mol_type = other DNA
gttctttgaatccttgcctctcttcctatccagctggcaccctgccctgtgaaggtgggctgaaggaggacagactgtcagagggatgagagtctccacctcctctcagc

SEQ ID NO: 69891 - DNA, 110 bp, synthetic construct
  source 1..110: mol_type = other DNA
gtgccaacttggggtcaactagaaacacatgcttattagctattagaaagcctgtaaagtccacattctgcgagtaggaagcaacatgcagagcgcagagcacgacatgt

SEQ ID NO: 69892 - DNA, 110 bp, synthetic construct
  source 1..110: mol_type = other DNA
gagagtgggctgaggacggcccctgcgattctcctacacacgtgagtaatggggtgtttcactgtcctttgcagcagcagcttgcctggtgttggctggtggtgggttgt

SEQ ID NO: 69893 - DNA, 110 bp, synthetic construct
  source 1..110: mol_type = other DNA
gtttcactgtcctttgcagcagcagcttgcctggtgttggctggtggtgggttgtttgtgtgtgtgctacacagtcccacacatccatactcacacccatcaaacatgtg

SEQ ID NO: 69894 - DNA, 110 bp, synthetic construct
  source 1..110: mol_type = other DNA
aggcagccctgtgatcccctctgggaaaaagctctctagtaagtccagacaggtggagggctgagcgggagatgtcacccagtggatgggtgtcctcacgcagcggttct

SEQ ID NO: 69895 - DNA, 110 bp, synthetic construct
  source 1..110: mol_type = other DNA
gattattataactatgaaactgctcataccttactaaagatacaggctttgctcagctgtatcttaacataatacttgaccgtatgtctgcacttcagtctttcagtggc

SEQ ID NO: 69896 - DNA, 110 bp, synthetic construct
  source 1..110: mol_type = other DNA
ggcgagttcccacctcttggactttgcagttgccgctcctgctgcctggaacgtgatgagcctctgttagtcagttgagtctgttcagatgccaccacctccatgtggcc

SEQ ID NO: 69897 - DNA, 110 bp, synthetic construct
  source 1..110: mol_type = other DNA
atgagcctctgttagtcagttgagtctgttcagatgccaccacctccatgtggccttccaggatttctccagtcagggtttaagggctgcttcctttgctttctccttct

SEQ ID NO: 69898 - DNA, 110 bp, synthetic construct
  source 1..110: mol_type = other DNA
tgtttgctgagtggattagctaatgaagagcagatgaaagcacacatcctctcatttccccagcagcagaatccctagctaaaaaaaattctcctttattttcatgcatt

SEQ ID NO: 69899 - DNA, 110 bp, synthetic construct
  source 1..110: mol_type = other DNA
tgtgagggagcaatttcatttcttgtgctcagcagagagcatggaagctcagagagacccagtgactcagccaaggccacaaggctgtgctggaagccaggcttccacct

SEQ ID NO: 69900 - DNA, 110 bp, synthetic construct
  source 1..110: mol_type = other DNA
gacccagtgactcagccaaggccacaaggctgtgctggaagccaggcttccacctccccacagggcagcgccaagaccctcagaccacagccccctgccccaaagggtgg

SEQ ID NO: 69901 - DNA, 110 bp, synthetic construct; identical to SEQ ID NO: 69899
  source 1..110: mol_type = other DNA

SEQ ID NO: 69902 - DNA, 110 bp, synthetic construct; identical to SEQ ID NO: 69900
  source 1..110: mol_type = other DNA

SEQ ID NO: 69903 - DNA, 110 bp, synthetic construct
  source 1..110: mol_type = other DNA
aggctgtgatcatggcccaggttgcccaccctggaccggtatcaggaacctcagggtcctggcccaattgagcctcttacccttacctggaggggtacacttgtgactga

SEQ ID NO: 69904 - DNA, 110 bp, synthetic construct
  source 1..110: mol_type = other DNA
ggaacagtgcccacattatacccccagactatgtcattggtgactccactgtttttgccacggggaaaaggtatttgaatttttactgtctatgctaagtgtgagatgca

SEQ ID NO: 69905 - DNA, 110 bp, synthetic construct
  source 1..110: mol_type = other DNA
tgccacggggaaaaggtatttgaatttttactgtctatgctaagtgtgagatgcagctgctaggatctttaccatttctgtgtctgaaggaaagctaatatttctctgag

SEQ ID NO: 69906 - DNA, 110 bp, synthetic construct; identical to SEQ ID NO: 69904
  source 1..110: mol_type = other DNA

SEQ ID NO: 69907 - DNA, 110 bp, synthetic construct; identical to SEQ ID NO: 69905
  source 1..110: mol_type = other DNA

SEQ ID NO: 69908 - DNA, 110 bp, synthetic construct
  source 1..110: mol_type = other DNA
cctgcaggcttaaagaatgcgagaatccttcacatttaagttaggttacattttggatatgtacattttgatgtgtctagggagccatcaaatggagctgtccattgcat

SEQ ID NO: 69909 - DNA, 110 bp, synthetic construct
  source 1..110: mol_type = other DNA
gatatgtacattttgatgtgtctagggagccatcaaatggagctgtccattgcattatttgatataagggtcagaatttgaaaagtggtatgaactgaagctttaggatt

SEQ ID NO: 69910 - DNA, 110 bp, synthetic construct
  source 1..110: mol_type = other DNA
tcctatatatttgaactaccagaggactcctaaaatgccatgccactctgcttttcaaaaccttccagtagcttccagaaataggtgtttttttggctagagaaaaacag

SEQ ID NO: 69911 - DNA, 110 bp, synthetic construct
  source 1..110: mol_type = other DNA
cccatatccgctagggcaaagcaaaccgggcccaacctctgggctcccattcaacatagcctccacctggctgtaccccgcttctccccacttattcccagtgtagcctg

SEQ ID NO: 69912 - DNA, 110 bp, synthetic construct
  source 1..110: mol_type = other DNA
aaggttcgcgacctgtgggctagtcccagggcagaccctacaagtgctcagaatgtgcgtgcgagtgtgtgtgtgttgggagtatgcagaggtctggcccattgagttct

SEQ ID NO: 69913 - DNA, 110 bp, synthetic construct
  source 1..110: mol_type = other DNA
tgcgtgcgagtgtgtgtgtgttgggagtatgcagaggtctggcccattgagttctctggcgggtcgctacgcacgggtcctaagccccgagtccggctcacaccatgtgg

SEQ ID NO: 69914 - DNA, 110 bp, synthetic construct; identical to SEQ ID NO: 69912
  source 1..110: mol_type = other DNA

SEQ ID NO: 69915 - DNA, 110 bp, synthetic construct; identical to SEQ ID NO: 69913
  source 1..110: mol_type = other DNA

SEQ ID NO: 69916 - DNA, 110 bp, synthetic construct
  source 1..110: mol_type = other DNA
ctttatgatattttaccaccctcctgtcttcttcagagtttctcacttgatgctgaggcatcctcctagtttatataaatcaattgttctctacattaattttattttgt

SEQ ID NO: 69917 - DNA, 110 bp, synthetic construct
  source 1..110: mol_type = other DNA
gagtttctcacttgatgctgaggcatcctcctagtttatataaatcaattgttctctacattaattttattttgtctttttgccttttctagggcctctctggcggcatg

SEQ ID NO: 69918 - DNA, 110 bp, synthetic construct
  source 1..110: mol_type = other DNA
ctggcagaacataatgtattagtttgttgaactcatgggtcttttgatctgatgccaccctggaccttgagcgttccaaggggctttgaggggagaaagctgatttgtgg

SEQ ID NO: 69919 - DNA, 110 bp, synthetic construct
  source 1..110: mol_type = other DNA
caccctggaccttgagcgttccaaggggctttgaggggagaaagctgatttgtggcatgaaatgggctacctgaatttgggaggctgggcatgctgcactgtgtatgctc

SEQ ID NO: 69920 - DNA, 110 bp, synthetic construct
  source 1..110: mol_type = other DNA
agcatttgttccttcaagtccccaagctggtcctcataggagcatttgctccccgatgctgcaagtcacctcagtggtcactgcactgcccttggcgatgaggcattgcc

SEQ ID NO: 69921 - DNA, 110 bp, synthetic construct
  source 1..110: mol_type = other DNA
ggaaacttctggatttcattgttatatgaacctgcctgtttctgtttgaaggaatgatacagggcctgattgtaatggcatgcttgtcacctacttattctgtgtggtct

SEQ ID NO: 69922 - DNA, 110 bp, synthetic construct
  source 1..110: mol_type = other DNA
aagtaccccaaatggggtgactcgaagagcaaaaatgtgtcctctcatagttccggaggacaaaagttcaggatcaaggtgttggcagggctggttcctctgaggattgt

SEQ ID NO: 69923 - DNA, 110 bp, synthetic construct
  source 1..110: mol_type = other DNA
attaattcagtaggcaccaaaactgtattaagtttctagtctctagaagtcatccagtgagaggccaagaccagaagtgaaaaaggtcctttccttgccattctttagac

SEQ ID NO: 69924 - DNA, 110 bp, synthetic construct
  source 1..110: mol_type = other DNA
agggttgttgtgagaattgtgtacgttgatagagataaaatatttcaaagagtttctggccatagtaattgctatgtagatgtacattcttaatgtatttgttgccactt

SEQ ID NO: 69925 - DNA, 110 bp, synthetic construct
  source 1..110: mol_type = other DNA
accctttgttcaacagctcggtttaccccccaggaaacttcctgcctcttggatcaatctcccaccccctctttcctgcacgggctctctcacctattataattaagttc

SEQ ID NO: 69926 - DNA, 110 bp, synthetic construct
  source 1..110: mol_type = other DNA
ctacagtcattgaaatctgtctcttcttgctggtcctgtctaaagcatctctctcccaagattggtcgtgagccccagagctcccatcttctaaggatgcgcttttgatg

SEQ ID NO: 69927 - DNA, 110 bp, synthetic construct
  source 1..110: mol_type = other DNA
caagcccacagagcatgtggctttgggggccagtggggctttattgcaggagatccacagggctaggggaaatagagactccactttaaaagagcacatacaggtgttcc

SEQ ID NO: 69928 - DNA, 110 bp, synthetic construct
  source 1..110: mol_type = other DNA
accctcaagtctggggtggggtaggaagagctctgaggattgaaagatacccgtgtcaaagcccagcttttctttgatggccttggacaagtcacttcgcttctggaagc

SEQ ID NO: 69929 - DNA, 110 bp, synthetic construct
  source 1..110: mol_type = other DNA
tcaaagcccagcttttctttgatggccttggacaagtcacttcgcttctggaagcctcttctgtgagcagggctatgccctgtcttgtaatctggtaagggggagtgtag

SEQ ID NO: 69930 - DNA, 110 bp, synthetic construct
  source 1..110: mol_type = other DNA
ctgatcccacacatgactactcacaagagaggtctgttataaagcaactttggtgcacagaggaaagagggagctgtttggtctgcccagggatagttgaggaggtaaca

SEQ ID NO: 69931 - DNA, 110 bp, synthetic construct
  source 1..110: mol_type = other DNA
gaagttctctggcatgtaatttcagctgagctgtggacacaactcttttaccttctgttgacagaggaagaagaggatttggggggatatcacagacaggcagagtggag

SEQ ID NO: 69932 - DNA, 110 bp, synthetic construct
  source 1..110: mol_type = other DNA
gggggcggttcagaggacccggcggctcttctctagcttgtggggcaggcggcgttgagggtgcagctcactcctggtcctcatttacaagaaaagctgggagctcaggc

SEQ ID NO: 69933 - DNA, 110 bp, synthetic construct
  source 1..110: mol_type = other DNA
tacacacattccctttgaccttgtccatgacctcccttctcacttgagaaaacaggcttcaaggtcctggaggcccagaaagggaagtgccagaggtggtgctggaaccc

SEQ ID NO: 69934 - DNA, 110 bp, synthetic construct
  source 1..110: mol_type = other DNA
gcaactccccggatttgtttctgtttaaagacccagccaggccttgcttaaaacattggagtctagcagtacatggactggtgtttgaatgtccagctcccttaagcatt

SEQ ID NO: 69935 - DNA, 110 bp, synthetic construct
  source 1..110: mol_type = other DNA
ttggagtctagcagtacatggactggtgtttgaatgtccagctcccttaagcatttacttgttccgggccctgtgcccctgtctgtgagtagcctggagaggagtcaacc

SEQ ID NO: 69936 - DNA, 110 bp, synthetic construct
  source 1..110: mol_type = other DNA
gcttgaaccataccggtgatctgaacaggtcccagcgcgtcaacacttataggtgctgagttcggcccacacattcattggcgcctctcattcccaccccagccctctaa

SEQ ID NO: 69937 - DNA, 110 bp, synthetic construct
  source 1..110: mol_type = other DNA
ctgagttcggcccacacattcattggcgcctctcattcccaccccagccctctaagggacaatcaggtcctcatcgagggaactcacttagggctcaggtttctaataca

SEQ ID NO: 69938 - DNA, 110 bp, synthetic construct
  source 1..110: mol_type = other DNA
tccaatatggagtcagatttgttcttctttattaagcatggagtcaggaaaatcaactgctgaccaggtaagagttggcagctgactccacttcccgtagtaggtgcaga

SEQ ID NO: 69939 - DNA, 110 bp, synthetic construct
  source 1..110: mol_type = other DNA
tcagtagtttggatatatcaaatagaattgggcaacaaggccagcaccaatgcatgagctgaacagctctcaactgaaacttcctttctccatacattcaaacacaggct

SEQ ID NO: 69940 - DNA, 110 bp, synthetic construct
  source 1..110: mol_type = other DNA
gctgagccacaaaggaaactcctaatcctgtaagtttttcattcattgactgatactaatacttgtcagctggataacactgccacattccatattatttgaaactcata

SEQ ID NO: 69941 - DNA, 110 bp, synthetic construct
  source 1..110: mol_type = other DNA
gataacttctcaggagtgaggctgtggctgattggctgcgttcagagcatgtgtactgctccgaagttatctgtaagagcctagttgcttactgggacttgggactttgg

SEQ ID NO: 69942 - DNA, 110 bp, synthetic construct
  source 1..110: mol_type = other DNA
ctgctccgaagttatctgtaagagcctagttgcttactgggacttgggactttggccggaggacccttttgtcctttcttgaatatgaaaaacaagtacttttttttttt

SEQ ID NO: 69943 - DNA, 110 bp, synthetic construct
  source 1..110: mol_type = other DNA
cacttgcaataaaaataaaaaaatacaagagaaaccctgtgacagttagtatttgtttacgctgactaaggttgttattttgactcttctcataagtgtgttggtgacct

SEQ ID NO: 69944 - DNA, 110 bp, synthetic construct
  source 1..110: mol_type = other DNA
tttacgctgactaaggttgttattttgactcttctcataagtgtgttggtgacctgggctctttgtagctcaccacactttgatagtcaggagaggaacccagtcttcat

SEQ ID NO: 69945 - DNA, 110 bp, synthetic construct
  source 1..110: mol_type = other DNA
gtgatatcacattgcggttttgatttgtattcccaaatgattagtgatgttcagcatcttttcatttggccatttgtatgtctttgagaaaattcctgttctgattctct

SEQ ID NO: 69946 - DNA, 110 bp, synthetic construct
  source 1..110: mol_type = other DNA
tcaggtgagcattgtggaaagaggcgagctctatctgtacacacccatcaggaaactgaggtttgggaactgactctgcttaatatctgaaggccagcgatcaaatcaat

SEQ ID NO: 69947 - DNA, 110 bp, synthetic construct
  source 1..110: mol_type = other DNA
cttaaataaaaggtgacctttcttttaaatctttttctgtggtttctcattagggaatagatcaagatgataaaataagaagagtctctccttgcttcaatttagctttg

SEQ ID NO: 69948 - DNA, 110 bp, synthetic construct
  source 1..110: mol_type = other DNA
aatagatcaagatgataaaataagaagagtctctccttgcttcaatttagctttgtgttattgttttgcttcagttctttgcagctaagatatcaaaagcagtttttttg

SEQ ID NO: 69949 - DNA, 110 bp, synthetic construct; identical to SEQ ID NO: 69947
  source 1..110: mol_type = other DNA

SEQ ID NO: 69950 - DNA, 110 bp, synthetic construct; identical to SEQ ID NO: 69948
  source 1..110: mol_type = other DNA

SEQ ID NO: 69951 - DNA, 110 bp, synthetic construct
  source 1..110: mol_type = other DNA
ggtttcttctgaggtctgtgaggaaaaatctgttcctatgcctctcctggcttttggtggtttgctggccatcagctgtgttcttcggtttgtaaaagcatcatcttaac

SEQ ID NO: 69952 - DNA, 110 bp, synthetic construct
  source 1..110: mol_type = other DNA
ggtggtttgctggccatcagctgtgttcttcggtttgtaaaagcatcatcttaacctcagccttgacgttcatgtgctatctctctgtatgtgagtctgtctccaaaatt

SEQ ID NO: 69953 - DNA, 110 bp, synthetic construct
  source 1..110: mol_type = other DNA
acagttgtggaactaacatttaatatctgaattccctatgtggccatacattctataaaagccagagaccatgtctctctctgttatctcattattcaaggcccctaaca

SEQ ID NO: 69954 - DNA, 110 bp, synthetic construct
  source 1..110: mol_type = other DNA
taaaagccagagaccatgtctctctctgttatctcattattcaaggcccctaacacaaccacatgtgccaaccacatggtatttgcttaatagctttttaaatgaataaa

SEQ ID NO: 69955 - DNA, 110 bp, synthetic construct
  source 1..110: mol_type = other DNA
tctattactggccctcatcccaatgggcagaactgggaatttgtcgccatacatttaaatagcttatttagctggcatggtctacattaattgctcctgccttcaatttt

SEQ ID NO: 69956 - DNA, 110 bp, synthetic construct
  source 1..110: mol_type = other DNA
taaatagcttatttagctggcatggtctacattaattgctcctgccttcaattttgtgccttgtaattttctccttacagagagaatacagataaaatttgatgggttgt

SEQ ID NO: 69957 - DNA, 110 bp, synthetic construct
  source 1..110: mol_type = other DNA
ggggcagccggtgtggggagggctgcttgtgcctatctcctgaagaagagaccaggcgccatgcaacatctgaggctgagagtagcttctcattgctgtggctctgctgg

SEQ ID NO: 69958 - DNA, 110 bp, synthetic construct
  source 1..110: mol_type = other DNA
gcgccatgcaacatctgaggctgagagtagcttctcattgctgtggctctgctggctttagggccatttataacagcagatgaaagtgaaagctttataggaaagtgttt

SEQ ID NO: 69959 - DNA, 110 bp, synthetic construct
  source 1..110: mol_type = other DNA
acttagttatctgagcaagccacgcagtttctctgagcctccctatcttctctatgaaatggggacagagcttcttgtcacacaggattgttgtagagtttaaatgaaat

SEQ ID NO: 69960 - DNA, 110 bp, synthetic construct
  source 1..110: mol_type = other DNA
gggttcctcatagaacaatgcccacactgctgcaatgaggcttgtgggactccttcccagtgcccacctcctgcaggagagctctgtgctccacagcagagctgccacaa

SEQ ID NO: 69961 - DNA, 110 bp, synthetic construct
  source 1..110: mol_type = other DNA
cctgctgatgtggggaactaccatcctactcccatgcaattgcagtctagtttggatggaatatcccctggagaggttgggattgggcttgtggcctccttcataggcaa

SEQ ID NO: 69962 - DNA, 110 bp, synthetic construct
  source 1..110: mol_type = other DNA
atggaatatcccctggagaggttgggattgggcttgtggcctccttcataggcaagcacataaactagttatttcccataaccctgtccccattgtgcaagcctgacatg

SEQ ID NO: 69963 - DNA, 110 bp, synthetic construct
  source 1..110: mol_type = other DNA
cagtggcttgggctcaaaacccaatgccccgggtccatggcagagcttcaagccgatgctaatagattctccctacctgaggacagagtctaggtgagtgtttgtgtgta

SEQ ID NO: 69964 - DNA, 110 bp, synthetic construct
  source 1..110: mol_type = other DNA
tagttcccgaggctggggattcgatctgagctccggcctgtgcgttctggtgtccacagtgctgcctctgaccgacgtctctgctctgttccaccccagggggaagatgt

SEQ ID NO: 69965 - DNA, 110 bp, synthetic construct
  source 1..110: mol_type = other DNA
gcctgtgcgttctggtgtccacagtgctgcctctgaccgacgtctctgctctgttccaccccagggggaagatgtgaccccagtgggcaggcgtgggacctgcatggtgg

SEQ ID NO: 69966 - DNA, 110 bp, synthetic construct
  source 1..110: mol_type = other DNA
aggggaaaaataaaaaataagttaactaggtaatgatacaaagtggtcacaatagagtccttttaagatacataaaacagtactgaactattacttacaggactctcctg

SEQ ID NO: 69967 - DNA, 110 bp, synthetic construct
  source 1..110: mol_type = other DNA
agtccttttaagatacataaaacagtactgaactattacttacaggactctcctggcagagacacccgagaagtagcgctgtgtatgaggccacgatgcaatcctccatg

SEQ ID NO: 69968 - DNA, 110 bp, synthetic construct
  source 1..110: mol_type = other DNA
ccctctcaagtcccttctacatcatgcagccatccaaggttctttttcctctcctccccaccccagctctgacagagcccaggacttactggttgccccctcctccccct

SEQ ID NO: 69969 - DNA, 110 bp, synthetic construct
  source 1..110: mol_type = other DNA
gttgcttgttaaggaaaaagacaatattcttatgctaatccaagctctggatccggagcaaagccgctgtgcaaacaatggctgtggagccagaaagtctgcagtgagtc

SEQ ID NO: 69970 - DNA, 110 bp, synthetic construct
  source 1..110: mol_type = other DNA
atgtctggtgaccttgacctttacctccaggctctcggcctccaggtctctccagatgatgcgctggcagtcgcccgccaggatttctttcttcagggggaacagcacct

SEQ ID NO: 69971 - DNA, 110 bp, synthetic construct
  source 1..110: mol_type = other DNA
atgatgcgctggcagtcgcccgccaggatttctttcttcagggggaacagcacctggcccaggagctggtgcttcctctgcttgtccacgtggtacactgagaacctcag

SEQ ID NO: 69972 - DNA, 110 bp, synthetic construct
  source 1..110: mol_type = other DNA
gtattaatgtcatgcctctagctgtttcttgtgtagctgggtgctaaggattcatcatgagagatgagcctggggaaatggcacgagtggtttaccacgtacctgtttcc

SEQ ID NO: 69973 - DNA, 110 bp, synthetic construct
  source 1..110: mol_type = other DNA
actctgacacaaaagaacttgatagaaaacagaagtggccactattcccttgagatggacagaacttgagtcccttatgtctttttgtggtggaagagctgcaacaagct

SEQ ID NO: 69974 - DNA, 110 bp, synthetic construct
  source 1..110: mol_type = other DNA
atcattttggctctatggaacttagtttcctcacctttaaaatgagcattggaataaaaatttattgctctatcttccaaatcaaaccatctacatacaagtccatgaag

SEQ ID NO: 69975 - DNA, 110 bp, synthetic construct
  source 1..110: mol_type = other DNA
cacattatcactttgttctttctccaccaaaagacggagcaaggtaggagggggacaagggatgtctgccctgtagtgtttagcatagctctggcccacagctgggcttc

SEQ ID NO: 69976 - DNA, 110 bp, synthetic construct
  source 1..110: mol_type = other DNA
caagggatgtctgccctgtagtgtttagcatagctctggcccacagctgggcttcaggaaatcaccgtagaattagctgaaagttacccagtgaatgcatacttccctta

SEQ ID NO: 69977 - DNA, 110 bp, synthetic construct
  source 1..110: mol_type = other DNA
ggctcacaatcaagttttgtacttcagttgactcaagagtctgtatgagaaatgtagtttcctcattcatggaatagtggctgtgagctccaaggctgaagaaaggctct

SEQ ID NO: 69978 - DNA, 110 bp, synthetic construct
  source 1..110: mol_type = other DNA
aggaggccctgagcctaccctgggctcagctcatctctaatttgttgaacagctttaagcacatatttcagcaacagacaaatagacaaagcctctggaggcacctgggt

SEQ ID NO: 69979 - DNA, 110 bp, synthetic construct
  source 1..110: mol_type = other DNA
taagcacatatttcagcaacagacaaatagacaaagcctctggaggcacctgggtcagacattcccagagggttgctgatgctcagacagaaggcctggcagaggcagcc

SEQ ID NO: 69980 - DNA, 110 bp, synthetic construct
  source 1..110: mol_type = other DNA
tgtgggtatgtggctggacaaggggatccaaacaggatggtccccatcccttcatgggcacagccttgcttggtagcgcctgcttgattgcttggtcatgttgcatcttt

SEQ ID NO: 69981 - DNA, 110 bp, synthetic construct
  source 1..110: mol_type = other DNA
ttcaggactcttgaggtctctgggagacttgctgccctaacagccaaggttaaagacttcaggctcccgcaggtttagcttctctttggggccgtaagtccaccccaacc

SEQ ID NO: 69982 - DNA, 110 bp, synthetic construct
  source 1..110: mol_type = other DNA
ccttgtaccctctcatttgtctaaatgcagcaatggggctcctaggatgtagtccaacctacaccaattctggtgaggatgcttagaattcagaaagcctcctatgtcag

SEQ ID NO: 69983 - DNA, 110 bp, synthetic construct
  source 1..110: mol_type = other DNA
atattccattgtgtatacattccacaatttctttttctactcatccatcagtgaacacttaggttgttttcatctcttagctattatacatggtgctgccatgaacatgg

SEQ ID NO: 69984 - DNA, 110 bp, synthetic construct
  source 1..110: mol_type = other DNA
tacattccacaatttctttttctactcatccatcagtgaacacttaggttgttttcatctcttagctattatacatggtgctgccatgaacatgggggtacatatatctt

SEQ ID NO: 69985 - DNA, 110 bp, synthetic construct; identical to SEQ ID NO: 69983
  source 1..110: mol_type = other DNA

SEQ ID NO: 69986 - DNA, 110 bp, synthetic construct; identical to SEQ ID NO: 69984
  source 1..110: mol_type = other DNA

SEQ ID NO: 69987 - DNA, 110 bp, synthetic construct
  source 1..110: mol_type = other DNA
gtggtccacacccatggagttcataagaggccaaactgaactccaaagccagatgccagctctttcctctcctgactgcctctcagtccccttttgcctggaagggttgg

SEQ ID NO: 69988 - DNA, 110 bp, synthetic construct
  source 1..110: mol_type = other DNA
ccagctctttcctctcctgactgcctctcagtccccttttgcctggaagggttggcaggggtgtggagagatgccaacatcccttagaggaggtgggagtgatcccctga

SEQ ID NO: 69989 - DNA, 110 bp, synthetic construct
  source 1..110: mol_type = other DNA
accaaaaagaattcttgggagttcccactgtggcaccacaggttgagcaactggtgttgccgtggctacaacgtatgtcgcagctgcagctcagatttgatccgtggcct

SEQ ID NO: 69990 - DNA, 110 bp, synthetic construct
  source 1..110: mol_type = other DNA
atatgctccccaactaaaactacatctgtgaactgtgctctaatactaagaaacattagttctgtcaatttatattcagtgctgataagaaagtactcaaggagctcctg

SEQ ID NO: 69991 - DNA, 110 bp, synthetic construct
  source 1..110: mol_type = other DNA
gagctgtttgtatattttggatattaagtccttttagtcttatcattcgcaagtattttcttccatcttataagttgtctttttgttttgttgatggttccctttaccgt

SEQ ID NO: 69992 - DNA, 110 bp, synthetic construct; identical to SEQ ID NO: 69991
  source 1..110: mol_type = other DNA

SEQ ID NO: 69993 - DNA, 110 bp, synthetic construct; identical to SEQ ID NO: 69991
  source 1..110: mol_type = other DNA

SEQ ID NO: 69994 - DNA, 110 bp, synthetic construct; identical to SEQ ID NO: 69991
  source 1..110: mol_type = other DNA

SEQ ID NO: 69995 - DNA, 110 bp, synthetic construct
  source 1..110: mol_type = other DNA
tgtggagttgaatttcattatttgagtgatcaacagtgaaataattatgtctaaagcctccttgcttcaggtcttaagctggtgtagaataaatgaggtaacaaattgat

SEQ ID NO: 69996 - DNA, 110 bp, synthetic construct
  source 1..110: mol_type = other DNA
caatgcaatcctaatcaaaatacagcaagctattctgtagatattgataaactaatcctaaaatttatgtgctaaggcagaggtgcttgtaagcaaaaatactttttttt

SEQ ID NO: 69997 - DNA, 110 bp, synthetic construct
  source 1..110: mol_type = other DNA
tccaggcaagtgtcacaacagcaggcgcagtgggtgagctccagccttttctgaaaggcacatggccttggcagggatcctgaagggggcatctgtgaaaggccagcccc

SEQ ID NO: 69998 - DNA, 110 bp, synthetic construct
  source 1..110: mol_type = other DNA
agtggctttagggttggtctcaggagcagtgccagtgttagcatgtcctccaatagctgtgcaggtgagttgaaatacctggctgcagccagatgccctcagaacaattg

SEQ ID NO: 69999 - DNA, 110 bp, synthetic construct
  source 1..110: mol_type = other DNA
agtgcttaaaccagaacagagcatgcatctgtgtgcagcagccgcacctcggcacccagcctgatgagctgagccacaggcttggaaactatgaggggcaccttaagaga

SEQ ID NO: 70000 - DNA, 110 bp, synthetic construct
  source 1..110: mol_type = other DNA
ccagcctgatgagctgagccacaggcttggaaactatgaggggcaccttaagagatgttatgtcagaacccacagcagggcggggagcacgagtgcaattacttgctgca

SEQ ID NO: 70001 - DNA, 110 bp, synthetic construct
  source 1..110: mol_type = other DNA
gttgggaaataccatagccataacaggaatttacatttgctggtgactgggctgctatcagggttatgtgctcacataggtgggggaaatgttagttcaaggtccctgca

SEQ ID NO: 70002 - DNA, 110 bp, synthetic construct
  source 1..110: mol_type = other DNA
tatcagggttatgtgctcacataggtgggggaaatgttagttcaaggtccctgcagaacacatggttaaataatatggatacaaaggcagcagtgatgcagaatagttta

SEQ ID NO: 70003 - DNA, 110 bp, synthetic construct
  source 1..110: mol_type = other DNA
tctaaaactacctgtgcctactccatccctatcagttattagtagctaatggcagctaacatttctaagcacttctactatatgccacatacttttaatacttcattgta

SEQ ID NO: 70004 - DNA, 110 bp, synthetic construct; identical to SEQ ID NO: 70003
  source 1..110: mol_type = other DNA

SEQ ID NO: 70005 - DNA, 110 bp, synthetic construct
  source 1..110: mol_type = other DNA
accactgcaccacaacaggatctcccatggttaaagaattttaaacaataactctatctccaaaatatcacagctagagaatttcaaaagagccattaacaacctgaatc

SEQ ID NO: 70006 - DNA, 110 bp, synthetic construct
  source 1..110: mol_type = other DNA
taactgtctgcattgtctggggagtcctgaaactggtgttggctcactgatgggtaaggtaagggcccttggggccataggacttgttccatcctgctggtgggtgggct

SEQ ID NO: 70007 - DNA, 110 bp, synthetic construct
  source 1..110: mol_type = other DNA
atgaaagaagtggtagcaatacttagacaaaacagagtttaaaacaaaagctgcagaaaaaaacaaagaagggccttgtatgatgatgaaggaatcaatacaagaagaag

SEQ ID NO: 70008 - DNA, 110 bp, synthetic construct
  source 1..110: mol_type = other DNA
ttagagctttctttcatccatgtcagtaatctctcatctcttataaaagatcacacagggaatgttgtagatgtaaatggatatagaaaaatggaagaggctccttgcac

SEQ ID NO: 70009 - DNA, 110 bp, synthetic construct; identical to SEQ ID NO: 70008
  source 1..110: mol_type = other DNA

SEQ ID NO: 70010 - DNA, 110 bp, synthetic construct; identical to SEQ ID NO: 70008
  source 1..110: mol_type = other DNA

SEQ ID NO: 70011 - DNA, 110 bp, synthetic construct; identical to SEQ ID NO: 70008
  source 1..110: mol_type = other DNA

SEQ ID NO: 70012 - DNA, 110 bp, synthetic construct
  source 1..110: mol_type = other DNA
aggagcctcaagatctatttctgagctgtggttctgagctgcagtgcaatataggtcagtttgctggactcccaccagggaaggagccactgagtattccactgatagag

SEQ ID NO: 70013 - DNA, 110 bp, synthetic construct
  source 1..110: mol_type = other DNA
gggacaggaacaggtaacagacactaaaatttaaatcagtttagtcctgaatggtttcaaggtaaaccgtcactagaggaccatacttgaactaataaaccttttattat

SEQ ID NO: 70014 - DNA, 110 bp, synthetic construct
  source 1..110: mol_type = other DNA
ttagtgttagattgcaatgccctcctctgaggtaattggggcagccagtggtgcctgttcatggaaccctagtggtagctggccactcccacttctgaagtcagtgataa

SEQ ID NO: 70015 - DNA, 110 bp, synthetic construct
  source 1..110: mol_type = other DNA
tctgaggtaattggggcagccagtggtgcctgttcatggaaccctagtggtagctggccactcccacttctgaagtcagtgataactgtggaggtttgcccctgccacct

SEQ ID NO: 70016 - DNA, 110 bp, synthetic construct
  source 1..110: mol_type = other DNA
tgtctgtgaagtccactgtgctgttgagttagaattcacaaaactttacccaatcttaagtatacaattgatctttgaacaatcttgttagcttatgcccacactccatg

SEQ ID NO: 70017 - DNA, 110 bp, synthetic construct
  source 1..110: mol_type = other DNA
ttaagtatacaattgatctttgaacaatcttgttagcttatgcccacactccatgcagtggaaaaatccatttttaacttctgactcccccagaacttaactgctaatag

SEQ ID NO: 70018 - DNA, 110 bp, synthetic construct; identical to SEQ ID NO: 70016
  source 1..110: mol_type = other DNA

SEQ ID NO: 70019 - DNA, 110 bp, synthetic construct; identical to SEQ ID NO: 70017
  source 1..110: mol_type = other DNA

SEQ ID NO: 70020 - DNA, 110 bp, synthetic construct
  source 1..110: mol_type = other DNA
gtcaccaaaggcaaccttccattcagtttatgtgattacttgtgccaggccagccaccttatattctgtataatgctggggtattttgaatatttttgatggataaagac

SEQ ID NO: 70021 - DNA, 110 bp, synthetic construct
  source 1..110: mol_type = other DNA
acatatatctgaataatgttgacataacttatcagctgatcttaccattcacagtcctataaaataggtaggaagagttaatacttacatggcactcactttgtgccagg

SEQ ID NO: 70022 - DNA, 110 bp, synthetic construct
  source 1..110: mol_type = other DNA
ttatcttccaaagtgttacaacacatcacatcctcaaaatttataaagaggacggtccgttgctcctacattttagatatataacttacttaagagagtaggttattgga

SEQ ID NO: 70023 - DNA, 110 bp, synthetic construct
  source 1..110: mol_type = other DNA
atgctttcataattctagaaattttctagccatgtgtgcttctccctatttttatggattccttttgaaagaatgaaacgcacatatatcccacatcttagctcagcagt

SEQ ID NO: 70024 - DNA, 110 bp, synthetic construct
  source 1..110: mol_type = other DNA
ggattccttttgaaagaatgaaacgcacatatatcccacatcttagctcagcagttaagtgaaaaataagctcacttcctctgtccaatagcaaaatctatactttagga

SEQ ID NO: 70025 - DNA, 110 bp, synthetic construct
  source 1..110: mol_type = other DNA
tggtgttgtatctaaaaagtcattgctggagttcctgctgtggcaatgtgggttaagggtatggtgttgctgcagctgtggcataggattcaatcactggcccaggaact

SEQ ID NO: 70026 - DNA, 110 bp, synthetic construct
  source 1..110: mol_type = other DNA
agggtatggtgttgctgcagctgtggcataggattcaatcactggcccaggaacttccaaatgctacaggtacagacaaaagaaaaaaaaaagatcatggagttcccatc

SEQ ID NO: 70027 - DNA, 110 bp, synthetic construct
  source 1..110: mol_type = other DNA
ccactcttacagttataccttccttaagttatttaatttttccttatgccactagtcaccatccaacaaattttttcaattatccccctctagattataagatacagagg

SEQ ID NO: 70028 - DNA, 110 bp, synthetic construct
  source 1..110: mol_type = other DNA
tcaccatccaacaaattttttcaattatccccctctagattataagatacagaggagcaggggtttggttggttttacttacttttgaattacccaaaccttaaagagta

SEQ ID NO: 70029 - DNA, 110 bp, synthetic construct
  source 1..110: mol_type = other DNA
tgttgcctcacttcctaacatccttctccagctgggctatttcctgggctgctgcggactcgtcccttcacacccccttcagagctgtggtttggcatctctgcacaaca

SEQ ID NO: 70030 - DNA, 110 bp, synthetic construct
  source 1..110: mol_type = other DNA
ggtcaattgaaaagacagcatatcatgggaccaaagggatctgggtttaaaactctagtttcttgcagactagctgtttgactttgtgcaggttagttaatctcactgtg

SEQ ID NO: 70031 - DNA, 110 bp, synthetic construct
  source 1..110: mol_type = other DNA
aaactgttaaaaactactagatccatgtcaaacgaaatcagaatcaaacttgaagaagttcccactggcctaagttcagacaattcaaacattaataagttaaaacaaaa

SEQ ID NO: 70032 - DNA, 110 bp, synthetic construct
  source 1..110: mol_type = other DNA
acaagtgcaacctgtaggcagagtatacggaaaaggcatttttagatataagactgatgaaagaatggacataggtttgtagaatacccaggaagccattctagccacag

SEQ ID NO: 70033 - DNA, 110 bp, synthetic construct
  source 1..110: mol_type = other DNA
atctctgtcaaatcagttgatattctgaacactagattctttactgcggtaatagggataagaaaatttagcttacaagcctttggtgattggatagcatatgtataggc

SEQ ID NO: 70034 - DNA, 110 bp, synthetic construct
  source 1..110: mol_type = other DNA
tgatgtataactcttgaatgagtgtggagaagaacagctgtagacaacaaattgatttcattggtcgagttgatcagcagcaggcaggggagctgctgtgagccagggcg

SEQ ID NO: 70035 - DNA, 110 bp, synthetic construct
  source 1..110: mol_type = other DNA
atctgcatttctttgcttacgtttttttgttttgggttttctttcctctacccctctttcttctctcagcgtactgaaagctaagacacttctgtctgttcactgttgtg

SEQ ID NO: 70036 - DNA, 110 bp, synthetic construct
  source 1..110: mol_type = other DNA
gaagaagagagaaatcctaaaccacaagggcaatgattcccaaagttttgtgagtaaaagaatcatcagggagatttattcaaaatgtacatttctaagccactcctcct

SEQ ID NO: 70037 - DNA, 110 bp, synthetic construct
  source 1..110: mol_type = other DNA
catttgagcatcatatttactagataattcctccaagtctctcccttatttaaaaaagttacttgatacagatgcatttacttaaattgatatcaattagggaatgccag

SEQ ID NO: 70038 - DNA, 110 bp, synthetic construct
  source 1..110: mol_type = other DNA
acttttttttcttttaaaaaagcagagcaggttgacagagcttccatttctcaaaagcagctccaactctccaaaaccagtttcaacactaagatgaacaaacattccac

SEQ ID NO: 70039 - DNA, 110 bp, synthetic construct
  source 1..110: mol_type = other DNA
ctgggctcaaggtggctgctgcagctcttgccatcatgttcattacacaactattaggaagggcattgaggcaagggagggtatgttgttccttttgagagcacaattag

SEQ ID NO: 70040 - DNA, 110 bp, synthetic construct
  source 1..110: mol_type = other DNA
taagcaatttttccaaagtcacacagctactaaatgactgtgaacccaagccactgactcttgcacccacatgctatcatccacttcctttagggcattttctatgtcaa

SEQ ID NO: 70041 - DNA, 110 bp, synthetic construct
  source 1..110: mol_type = other DNA
ctaaggatttaagaaggtgaatctcccaggccactagactaatataaccaagcgactgctcaacagaacaaatcactcactatcaacagtacttaactgtagaaaattgc

SEQ ID NO: 70042 - DNA, 110 bp, synthetic construct
  source 1..110: mol_type = other DNA
tcctgcagctgagcttaagggggcttcacacagtatggccaaccctactggatagtgaactcctttgaaaacagggccggagaagttcccttcgtggcttagcaattaac

SEQ ID NO: 70043 - DNA, 110 bp, synthetic construct
  source 1..110: mol_type = other DNA
tcacacagtatggccaaccctactggatagtgaactcctttgaaaacagggccggagaagttcccttcgtggcttagcaattaacgaacctgactaggaaccatgaggat

SEQ ID NO: 70044 - DNA, 110 bp, synthetic construct
  source 1..110: mol_type = other DNA
actatggaagagattaaatatcttggaaatgaaatgactcacccaagcactactaagagctgggatctgaatcaagccagtccggctccaggcttctcacatttagccac

SEQ ID NO: 70045 - DNA, 110 bp, synthetic construct
  source 1..110: mol_type = other DNA
agagctgggatctgaatcaagccagtccggctccaggcttctcacatttagccacttagcctaggctgccttctgctggagtgggtcaaaagcagggaaagtaggctatc

SEQ ID NO: 70046 - DNA, 110 bp, synthetic construct
  source 1..110: mol_type = other DNA
cactcggtccccttagagtttccactggggatcttatcgtgggaagacagtgtaggactcccactgggattgtcagcagatttcttgggagctctgcattgaggttttgc

SEQ ID NO: 70047 - DNA, 110 bp, synthetic construct
  source 1..110: mol_type = other DNA
gactcccactgggattgtcagcagatttcttgggagctctgcattgaggttttgcaacatccacccctcctttttaggagaagcctcctctcttgaaggtagatgacctt

SEQ ID NO: 70048 - DNA, 110 bp, synthetic construct
  source 1..110: mol_type = other DNA
accaccagtacaaaccgtactgtactgctaaggagcaccaagctgtccccaaccgtgggaaatgtccttcaggattgcaaaagcgagcactgaccactttagtttgatca

SEQ ID NO: 70049 - DNA, 110 bp, synthetic construct
  source 1..110: mol_type = other DNA
tgggaaatgtccttcaggattgcaaaagcgagcactgaccactttagtttgatcaccttttgctgtggtcacctccttgagagctaagaggatgaactcaataaccagac

SEQ ID NO: 70050 - DNA, 110 bp, synthetic construct
  source 1..110: mol_type = other DNA
catagccttcccctgaaagagggtgcagctcagctgtggctgcttagagctacgtttctgctcccacaatgaagcattttggataatcacccaatagttggatgatctta

SEQ ID NO: 70051 - DNA, 110 bp, synthetic construct
  source 1..110: mol_type = other DNA
ccgccctggaatgcttacggcaagctgaagagttcatccggcgagaacacgctagccaggcagaaatcagaagcctggtcacctggggaaactatgcctgggtctactat

SEQ ID NO: 70052 - DNA, 110 bp, synthetic construct
  source 1..110: mol_type = other DNA
tcataattgagcagctactacacagcaggcaccaagctaagaaccaagaatacggtcttgagcaaaaacaaagcccgtgtccttatctagattacagaaaggccttgcac

SEQ ID NO: 70053 - DNA, 110 bp, synthetic construct
  source 1..110: mol_type = other DNA
aaactttaatgaagagagcacctgtaaattgtgagacaagtttcagttctgctccaagcttgggtaaagtggaaatgggggcaggaagcagtcccaaacctacatttgtg

SEQ ID NO: 70054 - DNA, 110 bp, synthetic construct
  source 1..110: mol_type = other DNA
ctcccctctgctccagaggtttatattatatacttttcagtccaaactaaaatacacatatttttgaactctcagagattcaaggtatctctttaatcaatccccagtgt

SEQ ID NO: 70055 - DNA, 110 bp, synthetic construct
  source 1..110: mol_type = other DNA
acatatttttgaactctcagagattcaaggtatctctttaatcaatccccagtgtatagctattgattccttcatctttagtttgctcagcagagtggtacggtttctga

SEQ ID NO: 70056 - DNA, 110 bp, synthetic construct
  source 1..110: mol_type = other DNA
gctattagcagaccaccttaggtcttttttggtcagagacatgcagtcttcgttatgtgatctctccataggagagcttacaacatggttcttgacttttctgagaccta

SEQ ID NO: 70057 - DNA, 110 bp, synthetic construct
  source 1..110: mol_type = other DNA
aaaattgtgtccatgtggtcagggagggtctcacagctaagatgacatttgagcagttttaaattaagaatagcaattcattggaagagacgggaagagggggcagtgga

SEQ ID NO: 70058 - DNA, 110 bp, synthetic construct
  source 1..110: mol_type = other DNA
tgtctggagagcacacaacttacataagaatggctatgtgctccaaacacccaaaacaggacccacaaaacagccagcacccagtcacccgtcatatcagagaaccacaa

SEQ ID NO: 70059 - DNA, 110 bp, synthetic construct
  source 1..110: mol_type = other DNA
acaggacccacaaaacagccagcacccagtcacccgtcatatcagagaaccacaaatgacgccacttttgtccctgttcttcatgtctccttccttattctgtcatcctt

SEQ ID NO: 70060 - DNA, 110 bp, synthetic construct
  source 1..110: mol_type = other DNA
gagatggaggatgacaacagatgaagctggaatgatagcaagggatcagctcacgaaggatggtgtacatgatactgaagaactatatgaaactttgtccttagactgag

SEQ ID NO: 70061 - DNA, 110 bp, synthetic construct
  source 1..110: mol_type = other DNA
agagagacaaaggactgagctatggatagcatttcctgaggtggagaataacaaagaaacaggatgcttgccttgttgcaagatttatatgtgtgcctgtttggggatgg

SEQ ID NO: 70062 - DNA, 110 bp, synthetic construct
  source 1..110: mol_type = other DNA
ttaatttttctgtaagccttcagcctagatgttatcactggaatcttttctgggatgttccttcctagtctctgctttctgctagtttaggtattcatgtctttgaactc

SEQ ID NO: 70063 - DNA, 110 bp, synthetic construct
  source 1..110: mol_type = other DNA
tgttccttcctagtctctgctttctgctagtttaggtattcatgtctttgaactctagtggcattttatgtatacctcttttatgacagttatgtatattgaaattattg

SEQ ID NO: 70064 - DNA, 110 bp, synthetic construct; identical to SEQ ID NO: 70062
  source 1..110: mol_type = other DNA

SEQ ID NO: 70065 - DNA, 110 bp, synthetic construct; identical to SEQ ID NO: 70063
  source 1..110: mol_type = other DNA

SEQ ID NO: 70066 - DNA, 110 bp, synthetic construct
  source 1..110: mol_type = other DNA
ggtgctctataaacaattgctcagggagggaatgggctcataggatcttcactcagttcttttaaagtctactcaccattagatggagaaatagccagtagtgacgttat

SEQ ID NO: 70067 - DNA, 110 bp, synthetic construct
  source 1..110: mol_type = other DNA
atgtgtcacttcagctcccttgtctgctttagctctccattataccccattagcatggaggaatatattcactatcaagagatttttcttcctttcctcctcactccagg

SEQ ID NO: 70068 - DNA, 110 bp, synthetic construct
  source 1..110: mol_type = other DNA
acatatgtatatgtgtgtgtgtatgctgattcaaaagttgcagatttcatgacccttcacacctaaattccttagcttgtatctcccagaataaggacattttacccaca

SEQ ID NO: 70069 - DNA, 110 bp, synthetic construct
  source 1..110: mol_type = other DNA
aatgagttaatacatctaaagccctaagatattacacagaaaaagttcctggcattatctttgggaacctcccaggagaagtgaacagattctactgctgctcatttcta

SEQ ID NO: 70070 - DNA, 110 bp, synthetic construct
  source 1..110: mol_type = other DNA
agtcttataacaatccagtgactaggtgttactctcttcattttaggatggagggaaatattactgctatttagacaggaggaaacagaagttcagagaagtttcataac

SEQ ID NO: 70071 - DNA, 110 bp, synthetic construct
  source 1..110: mol_type = other DNA
tggactcagatcaaagcagcaagtgcccttccaaaatccctggtggccacccttttcccataatcactacaaagacattcagcttcctgggtgtccctggcattggtgta

SEQ ID NO: 70072 - DNA, 110 bp, synthetic construct
  source 1..110: mol_type = other DNA
caaacgggggagacatatgatgccctgtggagaacgtgcctactcatgtaaccatgcgcctctctgccatgggccacagggattgagctcaaatataaagagccatgtta

SEQ ID NO: 70073 - DNA, 110 bp, synthetic construct
  source 1..110: mol_type = other DNA
gcgcctctctgccatgggccacagggattgagctcaaatataaagagccatgttattgctaaaggcacacatgtatgtactttttacttgttgtagttgcggagctctgt

SEQ ID NO: 70074 - DNA, 110 bp, synthetic construct
  source 1..110: mol_type = other DNA
tcctccaagttcactgcaaccctccaaagcagctttttccccaggcactacctctgtgaacagcccccagctctcaggctttttctaccacatatcatgaactcgaaact

SEQ ID NO: 70075 - DNA, 110 bp, synthetic construct
  source 1..110: mol_type = other DNA
gtgaacagcccccagctctcaggctttttctaccacatatcatgaactcgaaactaagtattcagagtgctttttagggaaattagtctaaagacagcacagtaatggga

SEQ ID NO: 70076 - DNA, 110 bp, synthetic construct
  source 1..110: mol_type = other DNA
caggatgtcatccagcaggtgacggcctccccttcctcacctcagtcccatccacagagtaaactgttgggacaaatcagacatcagctcattttgtgaatgaggctgta

SEQ ID NO: 70077 - DNA, 110 bp, synthetic construct
  source 1..110: mol_type = other DNA
taacccttattcttccttgctacacataccccaacatgagaagagaaaaagtagtacaatatataatttgaaagtttttcacgtaccttttctcacctggcctattgaca

SEQ ID NO: 70078 - DNA, 110 bp, synthetic construct
  source 1..110: mol_type = other DNA
ataccccaacatgagaagagaaaaagtagtacaatatataatttgaaagtttttcacgtaccttttctcacctggcctattgacagtaattttaaaaactgattccaaaa

SEQ ID NO: 70079 - DNA, 110 bp, synthetic construct; identical to SEQ ID NO: 70077
  source 1..110: mol_type = other DNA

SEQ ID NO: 70080 - DNA, 110 bp, synthetic construct; identical to SEQ ID NO: 70078
  source 1..110: mol_type = other DNA

SEQ ID NO: 70081 - DNA, 110 bp, synthetic construct
  source 1..110: mol_type = other DNA
gtctgtctgcctggaaatttcacttcacttctttggaccacggtttctccatctacggatcaaagagactggactaagtaatgtccaacatttcttctagctctgtaact

SEQ ID NO: 70082 - DNA, 110 bp, synthetic construct
  source 1..110: mol_type = other DNA
cggatcaaagagactggactaagtaatgtccaacatttcttctagctctgtaacttcttaataactcagtttatctttgtctgttcattccagggcacaacaatattaac

SEQ ID NO: 70083 - DNA, 110 bp, synthetic construct
  source 1..110: mol_type = other DNA
tcttctatgaatggagttgacgcctctgtgcttaaaacataggagatagccaatactgttggtttaaatcaaccccattcactcgtctccaatccgaattcacctttctt

SEQ ID NO: 70084 - DNA, 110 bp, synthetic construct
  source 1..110: mol_type = other DNA
ccttatttcctgccttactgcatcctcacctaggaacagggggaaagctcaacgagagggaccatggtgacgtgctatgtccccacaagccaccatgcctggaggtggtg

SEQ ID NO: 70085 - DNA, 110 bp, synthetic construct
  source 1..110: mol_type = other DNA
cacgtgatcaaaccagccccctggcttagaaatattcagttatagtcagttacacatcctactccagggggtcggtcagctctacaaacacagcttcgcctgccaacgtt

SEQ ID NO: 70086 - DNA, 110 bp, synthetic construct
  source 1..110: mol_type = other DNA
caggaactcccaaagtgatctttttaaaaaacaattcagctcatgttctcttccctacccaaaatgctgtagcagctctcctcattacgtcctgttgctctccctctggt

SEQ ID NO: 70087 - DNA, 110 bp, synthetic construct
  source 1..110: mol_type = other DNA
tgggagccccttgggaatgaggacaccggagttgcatgaggcatgccacgagcactttctcttctgcttttggaagctcttgaagccatgcagtttgcatagggttgtac

SEQ ID NO: 70088 - DNA, 110 bp, synthetic construct
  source 1..110: mol_type = other DNA
cagtcctgcagctctcatgcaaggagatcagctccatatcatgcaggtggaggcgctgccttggtgcctcacaggagcagcacttctcaactctagagttctatttgcaa

SEQ ID NO: 70089 - DNA, 110 bp, synthetic construct
  source 1..110: mol_type = other DNA
atccagatggaggatggaatgatgatgtcaaccctccagaccctcctgacttcaatcagctaaagcttggaccttgtcaaactttgtgccagttctatgctccagccccc

SEQ ID NO: 70090 - DNA, 110 bp, synthetic construct
  source 1..110: mol_type = other DNA
tcagctaaagcttggaccttgtcaaactttgtgccagttctatgctccagccccctcatgaatatgcatatatccttagcttaaaacttccctaattttgtagttgaagg

SEQ ID NO: 70091 - DNA, 110 bp, synthetic construct
  source 1..110: mol_type = other DNA
tccaggttggagaagcgctggtgtgaaatgcagcccctgtcctcccacagtctgcgaacgtcccataaccactctctgtgacaattctagacagcaatcaaccaaccggg

SEQ ID NO: 70092 - DNA, 110 bp, synthetic construct
  source 1..110: mol_type = other DNA
gaacgtcccataaccactctctgtgacaattctagacagcaatcaaccaaccgggcataagctctcttctgctgggagggaggaagaactctaattcatcatggccagca

SEQ ID NO: 70093 - DNA, 110 bp, synthetic construct; identical to SEQ ID NO: 70091
  source 1..110: mol_type = other DNA

SEQ ID NO: 70094 - DNA, 110 bp, synthetic construct; identical to SEQ ID NO: 70092
  source 1..110: mol_type = other DNA

SEQ ID NO: 70095 - DNA, 110 bp, synthetic construct
  source 1..110: mol_type = other DNA
cttccacagcaggagctgtccttgggagaacaggataggcaaaggccacttcgccaacatttatttcctacccagtctctaccaaccgaagcaaatagctgctttctttt

SEQ ID NO: 70096 - DNA, 110 bp, synthetic construct
  source 1..110: mol_type = other DNA
gctacacccaaaataaaacaaaaaagatccaccattgctggaacacatccagctcacggtaccaggaagaaggagggcttcctgtggaggaggatggttctggattcatc

SEQ ID NO: 70097 - DNA, 110 bp, synthetic construct
  source 1..110: mol_type = other DNA
acggtaccaggaagaaggagggcttcctgtggaggaggatggttctggattcatccccgtggaccctgcctttctgctccccaaaccaacaggacagagcccagcttctg

SEQ ID NO: 70098 - DNA, 110 bp, synthetic construct
  source 1..110: mol_type = other DNA
cacagtgcagagctgttgccaagaagcagctgctcagccagaacctattatatctctgtccctgtcacatgaggggtgcccgtaagactaaacaggtcaaagcaacgtga

SEQ ID NO: 70099 - DNA, 110 bp, synthetic construct
  source 1..110: mol_type = other DNA
atttactggctcctactaaacaccagacaatgttctaaacaatggttcttgctatgaaagtacttagagcacaataacagtcatttgaacaatatgtcaaatgtatcttc

SEQ ID NO: 70100 - DNA, 110 bp, synthetic construct
  source 1..110: mol_type = other DNA
ctaaacaccagacaatgttctaaacaatggttcttgctatgaaagtacttagagcacaataacagtcatttgaacaatatgtcaaatgtatcttcctgctaaaaaatgaa

SEQ ID NO: 70101 - DNA, 110 bp, synthetic construct
  source 1..110: mol_type = other DNA
ttatattagtgaaaatgttctggatgtcaagtgacagaagcagactaaaattgcatgcataatgtgcattcagttagatatgtgcgtgtgtatgtttctcagttatctat

SEQ ID NO: 70102 - DNA, 110 bp, synthetic construct
  source 1..110: mol_type = other DNA
tcctttaaaggagcttcctctgactccccaccccacctcacacacagatcactcagcttgcatgggctcaatttgtgttctctgcttttgattttgcctacacatgactt

SEQ ID NO: 70103 - DNA, 110 bp, synthetic construct
  source 1..110: mol_type = other DNA
gcttgcatgggctcaatttgtgttctctgcttttgattttgcctacacatgactttttaaacattttttgagccacgtgtcagagactaggttttctgtttctgtgggat

SEQ ID NO: 70104 - DNA, 110 bp, synthetic construct
  source 1..110: mol_type = other DNA
aggaagtgtgagagaagcacgagagctgcaccttagcttcccctgtcacccaactggtgatgttcagatggtggaggcaccaccaggctggggcccaggtgaggataatg

SEQ ID NO: 70105 - DNA, 110 bp, synthetic construct
  source 1..110: mol_type = other DNA
tcttttatcctaagtaaatacggaggatatttgctgtaccttgaacctcagggtgtttcattaggagcaggagcccatatctcagggtgctagtggttgtctctgttcct

SEQ ID NO: 70106 - DNA, 110 bp, synthetic construct
  source 1..110: mol_type = other DNA
tttcattaggagcaggagcccatatctcagggtgctagtggttgtctctgttcctgctaaaacaaatttgttccggagtttatcaagttcttcaggtgaaattcagagtc

SEQ ID NO: 70107 - DNA, 110 bp, synthetic construct
  source 1..110: mol_type = other DNA
tccactttttgaagaaacgagattttagaacttttgcattatccttttcttaaatacttccttccactggtcagttaaatcagtctttcagtgtgtccttttctctctcc

SEQ ID NO: 70108 - DNA, 110 bp, synthetic construct
  source 1..110: mol_type = other DNA
atagttcagtaaataccctgtggagagaccctcataaacattatttgattgttccctttaaacaaattcctaaaggtgaaattatcaggtcaaatgtattaatatgatta

SEQ ID NO: 70109 - DNA, 110 bp, synthetic construct
  source 1..110: mol_type = other DNA
ttgaaattcaggagtcatcatgcctcactttcctaggctggactctgggtcttggatagactcagcagctcctccctttccaaatgatgaacgaagagaaggccctacaa

SEQ ID NO: 70110 - DNA, 110 bp, synthetic construct
  source 1..110: mol_type = other DNA
cttagcaaaacaatatctctaaagagctcaggaagggaaaataagagaacaaaatgccattaaaatagccttctacccccgccggagtcaatgaaaacttcatttcacat

SEQ ID NO: 70111 - DNA, 110 bp, synthetic construct
  source 1..110: mol_type = other DNA
gccattaaaatagccttctacccccgccggagtcaatgaaaacttcatttcacatgctaatcccccactccgcccccttctcttctcacaacacctttcccgaaagtgtt

SEQ ID NO: 70112 - DNA, 110 bp, synthetic construct
  source 1..110: mol_type = other DNA
caagaaggaatgaatgaacaaagtcactttgggaactcggggagcttaggaaggcctgatcatcacagatagagaccatgagcagcccagcttccggcaggacctgggaa

SEQ ID NO: 70113 - DNA, 110 bp, synthetic construct
  source 1..110: mol_type = other DNA
ctctccaactctcataccctaccctctaatagcccatatgtacgtgtgctccctcacattgtgccatcctgggaccacgtggcattgcccaccctctccccacacaaata

SEQ ID NO: 70114 - DNA, 110 bp, synthetic construct
  source 1..110: mol_type = other DNA
gccgtgaagggaggctgggggtagagaagcaccagcacgaggctgtggccaccccaggttgggcccagctggtccagaacagtgtgctctcctctctgagcaattgatca

SEQ ID NO: 70115 - DNA, 110 bp, synthetic construct
  source 1..110: mol_type = other DNA
aggttgggcccagctggtccagaacagtgtgctctcctctctgagcaattgatcacattcattgtttcaagtcaattcaattcagtgaccctttcctgggcatcagtcgc

SEQ ID NO: 70116 - DNA, 110 bp, synthetic construct
  source 1..110: mol_type = other DNA
aacggttgaggattccttagaggaaggccaggaggagaaggcaatatagttctatggtcaggagcacaggtctggagccggactgtgtaaatttgaaatctctctgtgtc

SEQ ID NO: 70117 - DNA, 110 bp, synthetic construct
  source 1..110: mol_type = other DNA
gacagttggtagtttgatttttgaagtgagtgaactaaattggaattcataaggggcagacattgactttgtataggtagactctgaatgtattacatggcctatggaat

SEQ ID NO: 70118 - DNA, 110 bp, synthetic construct
  source 1..110: mol_type = other DNA
ctccttctaccctaaataaccagtcagataaggaggcatctggaatgtccctcagaaaccaagtgcagccatgatggaaccactcacctggctgggacatctctagaggt

SEQ ID NO: 70119 - DNA, 110 bp, synthetic construct
  source 1..110: mol_type = other DNA
aaaccaagtgcagccatgatggaaccactcacctggctgggacatctctagaggttttgctatgtaccaacaaatagtctatagtcgtctaatagagtttctcaactggg

SEQ ID NO: 70120 - DNA, 110 bp, synthetic construct; identical to SEQ ID NO: 70118
  source 1..110: mol_type = other DNA

SEQ ID NO: 70121 - DNA, 110 bp, synthetic construct; identical to SEQ ID NO: 70119
  source 1..110: mol_type = other DNA

SEQ ID NO: 70122 - DNA, 110 bp, synthetic construct
  source 1..110: mol_type = other DNA
gacccgaggtggtcttcgtttgctttcagccttgggtctctttcgagtaagctggaagccccacaggggcttgagctgccttcggctgaaggtctggtgtttgaggaagc

SEQ ID NO: 70123 - DNA, 110 bp, synthetic construct
  source 1..110: mol_type = other DNA
gctgcctaaaaaaaccacagcacaacttgctgtgagaggtagctcatgggattctcaagctttgtatacaggcagtgcttggcaaaagtcagcatgtggggagttccgtt

SEQ ID NO: 70124 - DNA, 110 bp, synthetic construct
  source 1..110: mol_type = other DNA
tccctgaccagggacagtatgaatcccagtcaaggttagtaagagatcatctataagcaaaaaaagatctagcaagttgaaattgggctagggacctgagcaagtcaccc

SEQ ID NO: 70125 - DNA, 110 bp, synthetic construct
  source 1..110: mol_type = other DNA
agcaaaaaaagatctagcaagttgaaattgggctagggacctgagcaagtcaccccttttcataagactgaaggatcttagtagtgagttttttagccttcttttgaacc

SEQ ID NO: 70126 - DNA, 110 bp, synthetic construct
  source 1..110: mol_type = other DNA
aaaacttcgtctccacacccctcctcccaactcccttgaggaagggcagagggcttggagagtgaattcagtcaccagctgccaatgatttaatcagtcatgactatata

SEQ ID NO: 70127 - DNA, 110 bp, synthetic construct
  source 1..110: mol_type = other DNA
gggctgttgtttttaggttaaaaaggaatatctaattttaaaacatcaccaaaatagacagtccccggccagttctctcatcaggagagggagccttaaaaccaagtcct

SEQ ID NO: 70128 - DNA, 110 bp, synthetic construct
  source 1..110: mol_type = other DNA
agacagtccccggccagttctctcatcaggagagggagccttaaaaccaagtccttgtctctgagtgagagtcaagccatgtgatctaaaaccacatctctggttttcca

SEQ ID NO: 70129 - DNA, 110 bp, synthetic construct; identical to SEQ ID NO: 70127
  source 1..110: mol_type = other DNA

SEQ ID NO: 70130 - DNA, 110 bp, synthetic construct; identical to SEQ ID NO: 70128
  source 1..110: mol_type = other DNA

SEQ ID NO: 70131 - DNA, 110 bp, synthetic construct
  source 1..110: mol_type = other DNA
tcctctacaggacagatcaacttgaatttgcaggtgattctacccagagcccaactgagctggcagaaggttttgcctagagcccataccctaacttttcagacaattct

SEQ ID NO: 70132 - DNA, 110 bp, synthetic construct
  source 1..110: mol_type = other DNA
cagggagaagtgggttcagcaacagtcaagatttctcctctagtacttcctaagttcagggcaatttctgctgccactctctcaccagttggcttctttgtgttaccacc

SEQ ID NO: 70133 - DNA, 110 bp, synthetic construct
  source 1..110: mol_type = other DNA
atgggatgcttctcctgagctgaagcctcatccttggctattctcactcctctggggagcccttctcctggatttctccacccagactcctctttcatgcttcccttgta

SEQ ID NO: 70134 - DNA, 110 bp, synthetic construct
  source 1..110: mol_type = other DNA
ggagcccttctcctggatttctccacccagactcctctttcatgcttcccttgtatccagacttgctctcagaaaaatctcccaatccttcttattactagccttggagg

SEQ ID NO: 70135 - DNA, 110 bp, synthetic construct; identical to SEQ ID NO: 70133
  source 1..110: mol_type = other DNA

SEQ ID NO: 70136 - DNA, 110 bp, synthetic construct; identical to SEQ ID NO: 70134
  source 1..110: mol_type = other DNA

SEQ ID NO: 70137 - DNA, 110 bp, synthetic construct
  source 1..110: mol_type = other DNA
gtattgcgaagctcaagggccactggaaattgaaccttctgccattctggacacagttgtttctaccagcttatgttgtagttttaatggctatgtcattcttttaaagt

SEQ ID NO: 70138 - DNA, 110 bp, synthetic construct
  source 1..110: mol_type = other DNA
gttgtttctaccagcttatgttgtagttttaatggctatgtcattcttttaaagttgcaccctgaccccttcccttctatttcagtaggagagaaaagtctattgtctta

SEQ ID NO: 70139 - DNA, 110 bp, synthetic construct
  source 1..110: mol_type = other DNA
gaaaggaaccagaggcacatgctggaaaggaatgtttgttgctctgtgagcctagttgctctccagcttaccatagatattgccacaacccaggagattctccctgaagc

SEQ ID NO: 70140 - DNA, 110 bp, synthetic construct
  source 1..110: mol_type = other DNA
aaaaaaaaaaaaaaagaagtccgaaccagtccctccctcatagagagaagctccagctttccttgtttccctagtccagtgggtctgcctcctcctgcattatgtgtgag

SEQ ID NO: 70141 - DNA, 110 bp, synthetic construct
  source 1..110: mol_type = other DNA
gctacctgacatggcagaaaatgaactagagtaggtactcagagggttctaatagtcccagctgtaacagttaagtagctgtggaatttttagcaagtttctttggcatc

SEQ ID NO: 70142 - DNA, 110 bp, synthetic construct
  source 1..110: mol_type = other DNA
tcccagctgtaacagttaagtagctgtggaatttttagcaagtttctttggcatctgtccttaactctctcctttgtaatatttcttgtttgtttgtttgctttctaggg

SEQ ID NO: 70143 - DNA, 110 bp, synthetic construct
  source 1..110: mol_type = other DNA
caccactgagccacaatgggaactccataccacgaagacaactttccttagctcgtctgaaaatgagtgggccttagtagggggctgtatgaaaccaagactctttgagt

SEQ ID NO: 70144 - DNA, 110 bp, synthetic construct
  source 1..110: mol_type = other DNA
caggaatcccaggtgttccaaacaagataaacccacagagtctcacactaagatacaatgtgattaaaatgtcagaagttaaagagacactcttaaaggcagcaagaaaa

SEQ ID NO: 70145 - DNA, 110 bp, synthetic construct
  source 1..110: mol_type = other DNA
tgtaaagtacatcactgaggtagaaaagaggaaccagggtgattgcgtatcaaggtctttgatgagctcaaaagggtgatataaaggtattatgataaatcataaagatc

SEQ ID NO: 70146 - DNA, 110 bp, synthetic construct
  source 1..110: mol_type = other DNA
accagttctatttattgttcatgattttgttacctttgagaggtttttacaggttcttcttttaatagttgtcccattatcggaggatttaagttatattcactgagcta

SEQ ID NO: 70147 - DNA, 110 bp, synthetic construct
  source 1..110: mol_type = other DNA
cttcttttaatagttgtcccattatcggaggatttaagttatattcactgagctataattaccatgatagcggttctttctattctggaaaattgatacaatgttggcat

SEQ ID NO: 70148 - DNA, 110 bp, synthetic construct
  source 1..110: mol_type = other DNA
actcttgggaaacaagatgtgcattcctcatatgatggaggagaagaattagtttcagagaaatgcagtgacttggccaggagttcaggccagcatctggacctaacaac

SEQ ID NO: 70149 - DNA, 110 bp, synthetic construct
  source 1..110: mol_type = other DNA
cagagaaatgcagtgacttggccaggagttcaggccagcatctggacctaacaactcccaatgcagtccagtgcttgtttttgtttttcctacaaagccatctattcccc

SEQ ID NO: 70150 - DNA, 110 bp, synthetic construct
  source 1..110: mol_type = other DNA
cctgtccaagtcatcactcagtcacctctgtgaatgaaaatctcagaggtacacgttgaaacacctacgtctttcattaagagttgcatacaagtcctcttagatattta

SEQ ID NO: 70151 - DNA, 110 bp, synthetic construct
  source 1..110: mol_type = other DNA
agtagcccggggtttggatgccttggtaatcaaggtctgtatggagctgtgtgatcagccacctagaccaacagaagcacaagcaaagggtgaatggaatgtggactagg

SEQ ID NO: 70152 - DNA, 110 bp, synthetic construct
  source 1..110: mol_type = other DNA
actctaatcaagcttaattgttgccactcacaatgttgtttctcagagcacaaaagaaggactttaaatactgtggcctggcaatagcggagcctgattctgttagggag

SEQ ID NO: 70153 - DNA, 110 bp, synthetic construct
  source 1..110: mol_type = other DNA
cctctgtcacacatcatcacactatctaggggaacaatgaagcactaacaaaaagtgaaaaatgacttgtcgtaatcaacccaaaaaccacactgattcaggccacatga

SEQ ID NO: 70154 - DNA, 110 bp, synthetic construct
  source 1..110: mol_type = other DNA
tgaaaaatgacttgtcgtaatcaacccaaaaaccacactgattcaggccacatgaccaagaaaacgacagaatcgcccacttccatcttgtacagaaggagcaacataac

SEQ ID NO: 70155 - DNA, 110 bp, synthetic construct
  source 1..110: mol_type = other DNA
aaccacaagtcaggccatctggccctaggtcttatctgctattgaccagctctatgacctggaatcagtcacgtactttctgtgacctcctctcttcccaactctgaaaa

SEQ ID NO: 70156 - DNA, 110 bp, synthetic construct
  source 1..110: mol_type = other DNA
gacctggaatcagtcacgtactttctgtgacctcctctcttcccaactctgaaaaatgattatattactgtccactatcttagcaggttgcaagggtgtcctaagaagtg

SEQ ID NO: 70157 - DNA, 110 bp, synthetic construct
  source 1..110: mol_type = other DNA
tcaatgctgactgtgggaatgttttaaacaaatgtcagattcaaattctgtccacagttggtagtgcccattggttgtcagggatgcctttatcagtagttgcacagttc

SEQ ID NO: 70158 - DNA, 110 bp, synthetic construct
  source 1..110: mol_type = other DNA
cagaaggggttgtaggagacactgcttcccccacttgctataaaaccaatcctgtgaactgggtatcactgccaccttcctcacagacctgatccctagcagccacccag

SEQ ID NO: 70159 - DNA, 110 bp, synthetic construct
  source 1..110: mol_type = other DNA
gagacactgcttcccccacttgctataaaaccaatcctgtgaactgggtatcactgccaccttcctcacagacctgatccctagcagccacccagctccaggaaagggag

SEQ ID NO: 70160 - DNA, 110 bp, synthetic construct
  source 1..110: mol_type = other DNA
aagaaagggaaaagccacctctgaaagaacagcagagaacctatctgcaggtagttactacctgagaggaaaagccaaggaggtctgatatgttatttgcaaatgtatca

SEQ ID NO: 70161 - DNA, 110 bp, synthetic construct
  source 1..110: mol_type = other DNA
tactacctgagaggaaaagccaaggaggtctgatatgttatttgcaaatgtatcaatccaacaagccattccaaaggggtctcataaattttcatttctaacaaacagcc

SEQ ID NO: 70162 - DNA, 110 bp, synthetic construct
  source 1..110: mol_type = other DNA
cataaaagagaccaaataatgccatttgcatcaatatggaagcaactagacattttcatatggagtgaaacaagtcagaaagagaatgacaaacaccatatgatatcact

SEQ ID NO: 70163 - DNA, 110 bp, synthetic construct; identical to SEQ ID NO: 70162
  source 1..110: mol_type = other DNA

SEQ ID NO: 70164 - DNA, 110 bp, synthetic construct
  source 1..110: mol_type = other DNA
tcctccaagagaggaagccaaggagatccctagccaaacataggactgggaaaggcaaatataatgaatggggttaggagagatgaaattagaatatttgatgactttga

SEQ ID NO: 70165 - DNA, 110 bp, synthetic construct
  source 1..110: mol_type = other DNA
caaatataatgaatggggttaggagagatgaaattagaatatttgatgactttgagacaatacttactttgccttaatatgcttgcatttcaagctaggactagttctac

SEQ ID NO: 70166 - DNA, 110 bp, synthetic construct
  source 1..110: mol_type = other DNA
tggagggagtatctcgatcttacccccccttcactctccagtcctcccaggaccactgctcaaagctgggcttatgccagctaacataaatagctatggggttttgaaaa

SEQ ID NO: 70167 - DNA, 110 bp, synthetic construct
  source 1..110: mol_type = other DNA
gcacgttaggttgcgcttcctgcccgggttgacaaacagagttggcagcaggttcgctttagtggtgtttggggcacgtccatcctcttcggaggtatgcttttataaat

SEQ ID NO: 70168 - DNA, 110 bp, synthetic construct
  source 1..110: mol_type = other DNA
gctttagtggtgtttggggcacgtccatcctcttcggaggtatgcttttataaatgaggcaagattgcagagacaggtagagtaaggtaggcctctattaaaatggcaag

SEQ ID NO: 70169 - DNA, 110 bp, synthetic construct
  source 1..110: mol_type = other DNA
ccaacctctgctggcaaaagtcacaaagggaagagtaagtcttattctgtggcgagttgttcttctgtaacaggtactcgtcatctcccccgtggaaggtttttactcta

SEQ ID NO: 70170 - DNA, 110 bp, synthetic construct
  source 1..110: mol_type = other DNA
gttgttcttctgtaacaggtactcgtcatctcccccgtggaaggtttttactctagaatctgataactctgtttaacttcctttaaagtcgacagcatgcgaattttatt

SEQ ID NO: 70171 - DNA, 110 bp, synthetic construct
  source 1..110: mol_type = other DNA
gtaaagcaggatcccatcacccatctgttgtaaataaaacagtctgtatttaccaaccctgaactccctgtcagtcccccccccccacaccagcaaacgcaagtctgccc

SEQ ID NO: 70172 - DNA, 110 bp, synthetic construct
  source 1..110: mol_type = other DNA
aaaacagtctgtatttaccaaccctgaactccctgtcagtcccccccccccacaccagcaaacgcaagtctgccctccatgtccatgatctgtttctgttttgctaatag

SEQ ID NO: 70173 - DNA, 110 bp, synthetic construct
  source 1..110: mol_type = other DNA
ggcgtatgccaataccaaacaccacaatttgcttgttatagccatattactataattatcactcagtcccaggagcttggatgatcatactattaacagatagcaatcca

SEQ ID NO: 70174 - DNA, 110 bp, synthetic construct
  source 1..110: mol_type = other DNA
tgaaaaggtttattatttacacaatgaagcattgagaatatcaggtaagctctcatacaggtccaagagtgggttgagagaattgggacaggaaacgggcctgggttcct

SEQ ID NO: 70175 - DNA, 110 bp, synthetic construct
  source 1..110: mol_type = other DNA
tacaggtccaagagtgggttgagagaattgggacaggaaacgggcctgggttccttatcatggttaggggttggggctgagataaggattcccatgtgagaacagggact

SEQ ID NO: 70176 - DNA, 110 bp, synthetic construct
  source 1..110: mol_type = other DNA
ctcattcctaatttatggatggattgctctttcatctgtctgactctatgactcgttggacctatagcataatccagctcagagtagacctttggtgcccccatggtcaa

SEQ ID NO: 70177 - DNA, 110 bp, synthetic construct
  source 1..110: mol_type = other DNA
gcaaaaggggaaaggcacaggaaaagatgatgagatgtccctggaaggagacacaggaatgagggaagctgaggttggaggtttggagagaaacctctaaggatggggtg

SEQ ID NO: 70178 - DNA, 110 bp, synthetic construct
  source 1..110: mol_type = other DNA
catctgcttttgccttatgtagccacctcactcctatgaagttctacatcttggctatgtaagttggggactttcagtaagtgtgtgagggtgtgtctgtaatgttcttt

SEQ ID NO: 70179 - DNA, 110 bp, synthetic construct
  source 1..110: mol_type = other DNA
tatgtaagttggggactttcagtaagtgtgtgagggtgtgtctgtaatgttcttttcacttttaatctcaaatgatctgctgcagaagatagcaagatgctgtcccagaa

SEQ ID NO: 70180 - DNA, 110 bp, synthetic construct
  source 1..110: mol_type = other DNA
cttaatagcttctcagtactccctgaattttctgaagagatgttggtaatcttaacaaatgagtgtgatttttaaaatgcttagaatgaccatgtcaacctttggaaaat

SEQ ID NO: 70181 - DNA, 110 bp, synthetic construct
  source 1..110: mol_type = other DNA
atgggctcatgatattattttgtgttatattccaatactactctgttatgttgctcagattattctagctttaaccactggacgtcctttcagttggcttttgtatcctt

SEQ ID NO: 70182 - DNA, 110 bp, synthetic construct
  source 1..110: mol_type = other DNA
cagattattctagctttaaccactggacgtcctttcagttggcttttgtatccttttggtatgtccccatcattgtgggttgttttttccccccttttagcactttcttt

SEQ ID NO: 70183 - DNA, 110 bp, synthetic construct
  source 1..110: mol_type = other DNA
gtcttctctttgccatggagcacatgtaacgtctcctcccggtgtgacggcgcgtgagccccagtgatagacaacgcttccgaagcctgcgctgcaaacttgacacttgc

SEQ ID NO: 70184 - DNA, 110 bp, synthetic construct
  source 1..110: mol_type = other DNA
tgtgtgaaagttctggaagagaagagcttctaaacctcgaaagttgtcagggtgcttgcgtcctccctgacctgcggaatttcttcccgaggctcttctgtggtcttcga

SEQ ID NO: 70185 - DNA, 110 bp, synthetic construct
  source 1..110: mol_type = other DNA
ggcacttgggttgcgatgattgcagaatctgcttggtggaatgatgaagagcaagaattcaaaccctggcttggctactgggcagctgagtgaccaggtgtatcgtgtgt

SEQ ID NO: 70186 - DNA, 110 bp, synthetic construct
  source 1..110: mol_type = other DNA
tagtccatttgcaaatgggcccagagcattttcagattagctcctggagttcctgaatggctcagcggaaacgaatctgactactatcttcgaggacacaggttcaatcc

SEQ ID NO: 70187 - DNA, 110 bp, synthetic construct
  source 1..110: mol_type = other DNA
ccctcgggcaggcactacttgttaatgccaagtgcaaacggtgacgcacagaacgttaaattaacttggccactgctatacttggtgtattagttttccaacgtggccgt

SEQ ID NO: 70188 - DNA, 110 bp, synthetic construct
  source 1..110: mol_type = other DNA
atggtctatggggcgctctctctctgctttgctcccctctgtgaagttgctgtgcttttttctgagactttgaggtccctctctctcagctgatctcaccatcagttaca

SEQ ID NO: 70189 - DNA, 110 bp, synthetic construct
  source 1..110: mol_type = other DNA
gctttgctcccctctgtgaagttgctgtgcttttttctgagactttgaggtccctctctctcagctgatctcaccatcagttacatgggtttccagggtgtgggttcctt

SEQ ID NO: 70190 - DNA, 110 bp, synthetic construct
  source 1..110: mol_type = other DNA
attcattcatccaaatatttatgtggattattatgaatgcctaatagctgctaagaactaaaagagctgggaatatacataagcaagactaatatggcccctactttcaa

SEQ ID NO: 70191 - DNA, 110 bp, synthetic construct
  source 1..110: mol_type = other DNA
tggacaacagggaactcattacagtgacgtttttaaaaagggaagcaaagaagatgaatccttcgaatgcctatcttctgactgagctaatatctgaagacaccaaccta

SEQ ID NO: 70192 - DNA, 110 bp, synthetic construct
  source 1..110: mol_type = other DNA
tctgtgacagtcatctcagatctcccaataaatgacaacagatggccccagctgctccactctgaaatccatcagtgttcaccgaggccacatttcccaaggacagcttc

SEQ ID NO: 70193 - DNA, 110 bp, synthetic construct
  source 1..110: mol_type = other DNA
tccactctgaaatccatcagtgttcaccgaggccacatttcccaaggacagcttccagctattgacagcacagcaaaaacagaggggcagggtattcctgggacgtctat

SEQ ID NO: 70194 - DNA, 110 bp, synthetic construct
  source 1..110: mol_type = other DNA
aaagctgttcgtgaaagattttttattggtgttatggaacctcagttaatgcaaacgtgagtggcttgtttacttagaaattcaaaaaatcactgtgttcatgtgttcat

SEQ ID NO: 70195 - DNA, 110 bp, synthetic construct
  source 1..110: mol_type = other DNA
ccgtgggtgagtagtaaatggagagtttgtacaatccttagtaatgataacttcgtgaagttggctgagtttacacagtgttttcatagactgttaactcattcaattct

SEQ ID NO: 70196 - DNA, 110 bp, synthetic construct
  source 1..110: mol_type = other DNA
ctacaaaatccaagaaaacttaagaccaaaagctgaagtccagagcagttgtgctaaggtggcccaaggaatgactctagaggtcatgaccctgaagaggtggaagcaga

SEQ ID NO: 70197 - DNA, 110 bp, synthetic construct
  source 1..110: mol_type = other DNA
aaagactgccagtttttcccacacacagtgactctgaacactagtatgaataatcaatttatgtcctggaatctgaccaatcgtacaattcatgatttttttttttctct

SEQ ID NO: 70198 - DNA, 110 bp, synthetic construct
  source 1..110: mol_type = other DNA
aatttatgtcctggaatctgaccaatcgtacaattcatgatttttttttttctctctccttttagggcctcacccacagcacatggaagctcccgggccaggggttgaat

SEQ ID NO: 70199 - DNA, 110 bp, synthetic construct
  source 1..110: mol_type = other DNA
tctgtactagtttgcaatttgcgatgctttcatttccactgtcttttaaaaaactacgtatttgaaataagccttaggagatagatgttatttctgttttattgatgaag

SEQ ID NO: 70200 - DNA, 110 bp, synthetic construct
  source 1..110: mol_type = other DNA
cctccaaaaaaaaaaaaaaaaaaaaaaatccccactttgccctgggatctgtgaatgataccttatttagaaaaaggcttttcccttttgtgtgatttggttaagatcta

SEQ ID NO: 70201 - DNA, 110 bp, synthetic construct
  source 1..110: mol_type = other DNA
tgataccttatttagaaaaaggcttttcccttttgtgtgatttggttaagatctagtgatgagagattatcctgggttatccaggcaggtcctaaatgcaaacaccattg

SEQ ID NO: 70202 - DNA, 110 bp, synthetic construct
  source 1..110: mol_type = other DNA
tgccagtgttcttaatatgactacttccttgtcatctttctaactgaagttcagagatcctctcccctgggaatctttgaccgccgtacccacatcaaaatctcacctgt

SEQ ID NO: 70203 - DNA, 110 bp, synthetic construct
  source 1..110: mol_type = other DNA
gatcctctcccctgggaatctttgaccgccgtacccacatcaaaatctcacctgtatctgtctttctctcttgccctgtgcctacttcttagaattagtctctgtgtgat

SEQ ID NO: 70204 - DNA, 110 bp, synthetic construct
  source 1..110: mol_type = other DNA
gatttctagcaggacaatgccaagatcctttgctggagtgaacattcacagagattctccccaggcccccatcctaagaagtttagagctgtgagatggagccagcaaac

SEQ ID NO: 70205 - DNA, 110 bp, synthetic construct
  source 1..110: mol_type = other DNA
acatttttgaaagacctcttataaaagcccttgttctttttaagtgtgttaccggaactacttcccaatattacgttttctcattttactttgcaagggacagacagttc

SEQ ID NO: 70206 - DNA, 110 bp, synthetic construct
  source 1..110: mol_type = other DNA
tctaccttgcttattaatctgcatacctggcatcaaatgtcccccaagctagaccaggagttccagagaacaggggccctctgctgtctgggtcactcctttatcctcaa

SEQ ID NO: 70207 - DNA, 110 bp, synthetic construct
  source 1..110: mol_type = other DNA
gcacagaaggtcttggaagaaaccaaatgtctaattacccagaaaatctggtgttggcaattagcaaacaagctattatctgcagacaaaccatccaccccactggcagc

SEQ ID NO: 70208 - DNA, 110 bp, synthetic construct
  source 1..110: mol_type = other DNA
tggctgttacttttactctcagtgatgctgtgggtaagatctgtccagcctccccacttcttccttaatttgcttggctcagggcagcttcgcaatcaatccccccatct

SEQ ID NO: 70209 - DNA, 110 bp, synthetic construct
  source 1..110: mol_type = other DNA
ccaaacttatgcttatatttatcattccttccctattttttaaatgcctgaattgttgcacctgcacaccatccaagctcgccactggcaaacgtttaacaattggatag

SEQ ID NO: 70210 - DNA, 110 bp, synthetic construct
  source 1..110: mol_type = other DNA
gccacaacgggaactccgaggcatatttatttttaaaaaattcttttgtgagtatcaataaaattttgaagacactgttgtaggccacggtgctctaggggtggtggcag

SEQ ID NO: 70211 - DNA, 110 bp, synthetic construct
  source 1..110: mol_type = other DNA
actgaaatccagagctttctaatatgacttcataattaatccagccttaaaaacttccactgtttccctttaaacacagtatgttccagtaaaattgtagtttgacttaa

SEQ ID NO: 70212 - DNA, 110 bp, synthetic construct
  source 1..110: mol_type = other DNA
atgctgtggacttttgtcatcacttttgctggcgtttgattccccctcctcgactaagatgatattaccccctaaaacaggcctgcttcatataatttatagccctcttg

SEQ ID NO: 70213 - DNA, 110 bp, synthetic construct
  source 1..110: mol_type = other DNA
aagatgatattaccccctaaaacaggcctgcttcatataatttatagccctcttgcttctatcggagctctaagtaccaggttctggtgtgccaactttccttgcattta

SEQ ID NO: 70214 - DNA, 110 bp, synthetic construct
  source 1..110: mol_type = other DNA
tatagattttccagaaaagctaaataccaatatcacccctggcaacaggcttgtgtgatgttgtgatttaggaatagcaacagtcatgctggttcctatcttccaggcac

SEQ ID NO: 70215 - DNA, 110 bp, synthetic construct
  source 1..110: mol_type = other DNA
tatccttttacctctaacgtctgcatttatttttacatgaagtatgtctcctgtaggcaagatatccaatctgacagtttctacttttaattggggtgttggcatcactt

SEQ ID NO: 70216 - DNA, 110 bp, synthetic construct
  source 1..110: mol_type = other DNA
ggcaagatatccaatctgacagtttctacttttaattggggtgttggcatcacttaatgtgtttaatgacatagtttggttgaagtccatcatcctgttacttggttttt

SEQ ID NO: 70217 - DNA, 110 bp, synthetic construct
  source 1..110: mol_type = other DNA
aaaaaatatgtatatggccctttgattcatatccttgactctgacttcatagtaaaggagcttatacaacacctgttttaatgatgactattaaggcttcaaattttatg

SEQ ID NO: 70218 - DNA, 110 bp, synthetic construct
  source 1..110: mol_type = other DNA
cagctgaataatgctatgcatcaaccatttcctcaccccaggtaatttcagctcgcagttgcgttctcacctctgttgcagacttgaattctgagacacaggtcacctcc

SEQ ID NO: 70219 - DNA, 110 bp, synthetic construct
  source 1..110: mol_type = other DNA
tatccatccttgctttgctgtttcctctgtcagaatggctcttactccctctcctctcacccccaccctgttttcccacctcctcatgcctgcatgcccagacctggagc

SEQ ID NO: 70220 - DNA, 110 bp, synthetic construct
  source 1..110: mol_type = other DNA
ctcacccccaccctgttttcccacctcctcatgcctgcatgcccagacctggagcaaagccctcttctccctgggtgtcactatcacagcttccactcctgagagccagc

SEQ ID NO: 70221 - DNA, 110 bp, synthetic construct
  source 1..110: mol_type = other DNA
attttacctacactcagagcattctttcaatccatgaattcagatctttctccagttcaggaaagttttctactattatatctttgaatatttttatcttcttcagcagc

SEQ ID NO: 70222 - DNA, 110 bp, synthetic construct
  source 1..110: mol_type = other DNA
ctttctccagttcaggaaagttttctactattatatctttgaatatttttatcttcttcagcagctacacctggacacatatagctatgtaatctcatctctatatcaat

SEQ ID NO: 70223 - DNA, 110 bp, synthetic construct
  source 1..110: mol_type = other DNA
atatgacccaattcacactcaccagcgctgcaggggcctctcttttgcttcgtgaattgtaacagctcattatatatgacacgagttcttctaatggtcaggaacgtgtg

SEQ ID NO: 70224 - DNA, 110 bp, synthetic construct
  source 1..110: mol_type = other DNA
attgtaacagctcattatatatgacacgagttcttctaatggtcaggaacgtgtggaaagaagacagcatttttcacggatgttcggaaccacccccacaccccccgcct

SEQ ID NO: 70225 - DNA, 110 bp, synthetic construct
  source 1..110: mol_type = other DNA
tgcagctcctattcaaccccagcccaggaatttccatatgccacagacgcagccctaaaaaaaaaagtcccagcaagtgcattgatggtcaatctgaatcgcttctggag

SEQ ID NO: 70226 - DNA, 110 bp, synthetic construct
  source 1..110: mol_type = other DNA
taaaaaaaaaagtcccagcaagtgcattgatggtcaatctgaatcgcttctggagctatacctgcagggagtctgggaaatgcagatcggagcttttcagcctctgccat

SEQ ID NO: 70227 - DNA, 110 bp, synthetic construct
  source 1..110: mol_type = other DNA
cccagcatgggggacaaggttcctacctcagctggccttcccagaggtccatcaccccacagacctaaagcccagctctggttccccttagtctgctgagttggggatct

SEQ ID NO: 70228 - DNA, 110 bp, synthetic construct
  source 1..110: mol_type = other DNA
ggcatgtccatacaaaggaatgctgtccagctataaaaaaaatatactgatacacacaattaaatggataaaactctaggagttccctctgtggcacagtgggctaagaa

SEQ ID NO: 70229 - DNA, 110 bp, synthetic construct
  source 1..110: mol_type = other DNA
ggaggggcggggaccagcctgggttctccaggtctccacggccttcctgttcctacaaacccagctgctccggctgtctctccttggattccttgagactctggtgatcc

SEQ ID NO: 70230 - DNA, 110 bp, synthetic construct
  source 1..110: mol_type = other DNA
gctttgccagaggaactttctcagtgggtcctcctggcatggatttggtctcctttgtactgccctccaaggagaacctgtctcaactctctcctagctggatcactgtt

SEQ ID NO: 70231 - DNA, 110 bp, synthetic construct
  source 1..110: mol_type = other DNA
tgtactgccctccaaggagaacctgtctcaactctctcctagctggatcactgtttttgcttagtgcttttaatgtggcgggggatgcatctctcatcttctcactaacc

SEQ ID NO: 70232 - DNA, 110 bp, synthetic construct
  source 1..110: mol_type = other DNA
catgctgtgagtgcagccaaaaaaacaccaaagccaaccaaacaaaacattatctccatatatttttaaatcctcaggatttaaaatactaaatatacagtagaaatact

SEQ ID NO: 70233 - DNA, 110 bp, synthetic construct
  source 1..110: mol_type = other DNA
tataaatgggtgacacaggctttgagggtagaattcatgtacttaccatctcaatagcatgtggttgtttcttaactttgggagcttctaggaaatgcagaccagctcag

SEQ ID NO: 70234 - DNA, 110 bp, synthetic construct
  source 1..110: mol_type = other DNA
agcatgtggttgtttcttaactttgggagcttctaggaaatgcagaccagctcagggaagaggcagaggagttaggaaacgagaaagccactgagaagatgagaatcata

SEQ ID NO: 70235 - DNA, 110 bp, synthetic construct
  source 1..110: mol_type = other DNA
atatttttggtcattttgtcatgcctcactagtttgtattactttaatgcaggagtggcaattttttcctgcatatggccagataataaatattttaggctttgcaggtc

SEQ ID NO: 70236 - DNA, 110 bp, synthetic construct
  source 1..110: mol_type = other DNA
tggcaattttttcctgcatatggccagataataaatattttaggctttgcaggtcatatgggctctgctgtatctacttaagtctgccagtgtagtgtgaaagcatttgt

SEQ ID NO: 70237 - DNA, 110 bp, synthetic construct
  source 1..110: mol_type = other DNA
ggtcagaaaatccaaacagctctgagcacgcgtgttgtagtgcagtctgtggctgcgtctgtggaaaacaggccccaaggtaacggagtttggcgactcatcacgccttc

SEQ ID NO: 70238 - DNA, 110 bp, synthetic construct
  source 1..110: mol_type = other DNA
aacccataatgatggtagcattcaagaagctcttatgtgctaggcactgtgctcagtccttaatggaacttacatcatttcatcccataacagcgtttggtgggaagtac

SEQ ID NO: 70239 - DNA, 110 bp, synthetic construct
  source 1..110: mol_type = other DNA
cgtgttccttcctgagttatcagtgcaccttcaaggggagctggtatgaaccatgtggtggaaattggggctgtggagtcaaaggccgcccttcccacagtcaaggtgtt

SEQ ID NO: 70240 - DNA, 110 bp, synthetic construct
  source 1..110: mol_type = other DNA
acaaagtgaaggtcaaccgacaacaaaacattacccttccagaaggtgacattcaggaaagatgacctgttaattctcaaacttttgagtacagtatagctacgggagaa

SEQ ID NO: 70241 - DNA, 110 bp, synthetic construct
  source 1..110: mol_type = other DNA
gtgacattcaggaaagatgacctgttaattctcaaacttttgagtacagtatagctacgggagaactgtctttatgttttgtctttttagggccgcacctgtggcatatg

SEQ ID NO: 70242 - DNA, 110 bp, synthetic construct
  source 1..110: mol_type = other DNA
tagaccctgtagcacttagcactctagctagttagcaaaaatgtttagtgagctccttctatggggcaggcctatgctgggctttggacagaggtctgaatgagacattc

SEQ ID NO: 70243 - DNA, 110 bp, synthetic construct
  source 1..110: mol_type = other DNA
attgctgccagcctcttctttgttgctgttctgtaagtggtgcttcatttttacgtttcccacctcttgtttctttctttagctgaatagctaagattttctttgctacc

SEQ ID NO: 70244 - DNA, 110 bp, synthetic construct
  source 1..110: mol_type = other DNA
cggagcctctgccactttgcttgcaaaatggaaactccgaaattggttatctcacttctgagaacagaggatgtgtttaaatgacataaaagacccttcaggccaaggca

SEQ ID NO: 70245 - DNA, 110 bp, synthetic construct
  source 1..110: mol_type = other DNA
ttctgagaacagaggatgtgtttaaatgacataaaagacccttcaggccaaggcatccagaatggtgactgcaaaagtaaaacagccagaggaaggagtccgcataggat

SEQ ID NO: 70246 - DNA, 110 bp, synthetic construct
  source 1..110: mol_type = other DNA
gtatagttgatggagtcttctgattgctgtaggatgctatggaaccaggtcatgatttatccattctacgtttgtgagctgatggatatttgggttgcttccagtttgct

SEQ ID NO: 70247 - DNA, 110 bp, synthetic construct
  source 1..110: mol_type = other DNA
agttgggtttaaagattcttggtaaaattagctactggacacccagatgtgcttgtagatttgtacatgattagacaactgttgagtgctggcgaaaggtagccattggg

SEQ ID NO: 70248 - DNA, 110 bp, synthetic construct
  source 1..110: mol_type = other DNA
tagatttgtacatgattagacaactgttgagtgctggcgaaaggtagccattgggattatttgctgaagttctcagaggtccccacgtcctgccattctccttgggctac

SEQ ID NO: 70249 - DNA, 110 bp, synthetic construct
  source 1..110: mol_type = other DNA
aatcccaagtctttgaaacaactttccagaagtttttccaggtattgccagagaattgagaaatgaagaagtagtcctttaacctagtgtgggagaataaggaagcttta

SEQ ID NO: 70250 - DNA, 110 bp, synthetic construct
  source 1..110: mol_type = other DNA
gagagccctttggcacctcacgttcaaggtctcaactgccctaattcttctctcttcttggtctttctcatgtaaacacctgtggtacatacaccagaattctttacata

SEQ ID NO: 70251 - DNA, 110 bp, synthetic construct
  source 1..110: mol_type = other DNA
tcttggtctttctcatgtaaacacctgtggtacatacaccagaattctttacatactcctcccagattctgttgatttcaactcccaaatgcctctccaatttgtcacct

SEQ ID NO: 70252 - DNA, 110 bp, synthetic construct
  source 1..110: mol_type = other DNA
gagacgccattcaggcaggcctcccattttgtgaatgaaaaaaaaaaaaaaaaaaaaaaactaactaacaaaaatccggaggcacagagaggttttgcaattgcccaatc

SEQ ID NO: 70253 - DNA, 110 bp, synthetic construct
  source 1..110: mol_type = other DNA
aaaaactaactaacaaaaatccggaggcacagagaggttttgcaattgcccaatcggattgcatcccacccctgcctggaccctttggtggtttcccatccctctggcca

SEQ ID NO: 70254 - DNA, 110 bp, synthetic construct
  source 1..110: mol_type = other DNA
ctgtggctgtgtgttctgtctggcacacaaggagcattctgtaacatctgctgactgagcctgatgcatgacagaaacacacgacacttgggttcctggtgagaacactg

SEQ ID NO: 70255 - DNA, 110 bp, synthetic construct
  source 1..110: mol_type = other DNA
tgagcctgatgcatgacagaaacacacgacacttgggttcctggtgagaacactgagtaagaacatatccttgggagttcccatcttggctcagtggttaacaaatctga

SEQ ID NO: 70256 - DNA, 110 bp, synthetic construct
  source 1..110: mol_type = other DNA
tggttggacaagcgctctcaggttctctaattcgccctgatttgggcagtgggtgcttgctgatggggaaggaagtctctgaatagagtcaactcaggagagagttgtgc

SEQ ID NO: 70257 - DNA, 110 bp, synthetic construct
  source 1..110: mol_type = other DNA
cttgctgatggggaaggaagtctctgaatagagtcaactcaggagagagttgtgccaaaactcgaaacgcgagtttcatctccttctagccagtgtgtcttgtgtgagct

SEQ ID NO: 70258 - DNA, 110 bp, synthetic construct
  source 1..110: mol_type = other DNA
gacctggatctggtgttgccatggctgtggtgtaaacctgcagctgcagttcctatttgacccctgatctgggaacttccctatatcacaggtcagaccataaaaaagaa

SEQ ID NO: 70259 - DNA, 110 bp, synthetic construct
  source 1..110: mol_type = other DNA
tttgacccctgatctgggaacttccctatatcacaggtcagaccataaaaaagaaaaaggaaagaccaaaccgaaataaaaacatagaccaggaattcccttgtggctca

SEQ ID NO: 70260 - DNA, 110 bp, synthetic construct
  source 1..110: mol_type = other DNA
ctggatccttaacctgctgagccacaatgggaacaatgaaggcatcaggcttcagggattgccaatgacacccgtcaagagctgttttctgcatgggtcatgtgtcacct

SEQ ID NO: 70261 - DNA, 110 bp, synthetic construct
  source 1..110: mol_type = other DNA
gtgtgtgtgtgtgtgttttgttctgtttgtttttcagaggataaagtctcacactgagtgactgaccttgtccccagtgcccagccgtgtctgacctgccctcctctttg

SEQ ID NO: 70262 - DNA, 110 bp, synthetic construct
  source 1..110: mol_type = other DNA
gagtgactgaccttgtccccagtgcccagccgtgtctgacctgccctcctctttgcaggagccttccggctgtccttccgaacccaaacgcgctggccgcccggcctacg

SEQ ID NO: 70263 - DNA, 110 bp, synthetic construct
  source 1..110: mol_type = other DNA
ccaggaccatcccaggcaaatcaggacgtggggccaccctccctagaccagcaactgctacgggaagatgttagaatgttgcaccgtccatgtctgacgggaggtcctag

SEQ ID NO: 70264 - DNA, 110 bp, synthetic construct
  source 1..110: mol_type = other DNA
atgcaattaggaattcttctattagagccaacttcctttagtttttaatatactctttgttctttcaaagactgtacacaaagaagttttaactacttttctctccaggt

SEQ ID NO: 70265 - DNA, 110 bp, synthetic construct; identical to SEQ ID NO: 70264
  source 1..110: mol_type = other DNA

SEQ ID NO: 70266 - DNA, 110 bp, synthetic construct
  source 1..110: mol_type = other DNA
agaaaaaagaaaaaaaaaaaagagtatccaactgcaatggcttgggtccctgggagattcatgttcctttaatccccagcccagtgcagttggcccagaaatttctacat

SEQ ID NO: 70267 - DNA, 110 bp, synthetic construct
  source 1..110: mol_type = other DNA
aaacaacaggatttcacacagctctagtcattgtgatagtgtggtatggtccatccacagacaaccatctgatggaactgaatggaaagcctggacgcagacactgcaga

SEQ ID NO: 70268 - DNA, 110 bp, synthetic construct
  source 1..110: mol_type = other DNA
cacagacaaccatctgatggaactgaatggaaagcctggacgcagacactgcagaccattaaggggaaacatggaccagtcagttaaaaaggacttggagcactggttaa

SEQ ID NO: 70269 - DNA, 110 bp, synthetic construct
  source 1..110: mol_type = other DNA
catgtcccagctctgggaccttgggagggcacacttcgcctcatctataaataaaatgggcacaatcatagcagcaccttgtggatttaattatgtatcaacccaccccc

SEQ ID NO: 70270 - DNA, 110 bp, synthetic construct
  source 1..110: mol_type = other DNA
atgggcacaatcatagcagcaccttgtggatttaattatgtatcaacccaccccccacccccctcactttgggcctctactgctccacgagcttcccaacacttttgttc

SEQ ID NO: 70271 - DNA, 110 bp, synthetic construct
  source 1..110: mol_type = other DNA
tgtgcggtgccaaggtccttttccttctaagaataatgagaaattaaacatgaatggctcacatcctctctttcacatagaaggtggtcccgcttccccccctgaatatc

SEQ ID NO: 70272 - DNA, 110 bp, synthetic construct
  source 1..110: mol_type = other DNA
gaatctttgagataactgtgagctgtgtcataatatacttcggacagagaacacctattttttttttaatgtgcttttgatacggggctagaaaagggatgatctttgta

SEQ ID NO: 70273 - DNA, 110 bp, synthetic construct
  source 1..110: mol_type = other DNA
agagaacacctattttttttttaatgtgcttttgatacggggctagaaaagggatgatctttgtaaactgcctttatacaaaattcacacatttctaaaagaaagcagtt

SEQ ID NO: 70274 - DNA, 110 bp, synthetic construct
  source 1..110: mol_type = other DNA
cttttgcatgaatatctaggtgtggaatgactgggtcataggatagacatgttgttaactttttaaggaagctgttaaactgtgtatcattttacattcccaccagcaat

SEQ ID NO: 70275 - DNA, 110 bp, synthetic construct
  source 1..110: mol_type = other DNA
ccgggttttctgtagcacacggaggccagacgggaacagagggagtgggtttctgctgctgtccaagggcagggcagaagagtggtcatcatgggctctggactgtgact

SEQ ID NO: 70276 - DNA, 110 bp, synthetic construct
  source 1..110: mol_type = other DNA
acacacagctacctccgaaaagtgctctccctctccatagaagactgccgacccgaagcgaatcagactgcaggagcagcctcactgtaggtcactcactttagaccagg

SEQ ID NO: 70277 - DNA, 110 bp, synthetic construct
  source 1..110: mol_type = other DNA
aagctgtaattgagttaaatgtttgaaaagattgactcggactctagaagttcagataaagatgccccttcttttccagcatcatagatatgatcttcgaggcctcggtt

SEQ ID NO: 70278 - DNA, 110 bp, synthetic construct
  source 1..110: mol_type = other DNA
ataaagatgccccttcttttccagcatcatagatatgatcttcgaggcctcggttctctccactgggtctttgggatcagggtggagagaagcaaaggagaggaaaggaa

SEQ ID NO: 70279 - DNA, 110 bp, synthetic construct
  source 1..110: mol_type = other DNA
atgacataaccttaaaagattgattatggtaaccatataaaaattcaaaaattttgtacatcaaaaggtactctaagcaaagtgacaagaaagagaataatggggggggg

SEQ ID NO: 70280 - DNA, 110 bp, synthetic construct
  source 1..110: mol_type = other DNA
gtacatcaaaaggtactctaagcaaagtgacaagaaagagaataatgggggggggcatgtgtagctcaaatgagggtcaaagaactaattttgaatggatgtagggtaag

SEQ ID NO: 70281 - DNA, 110 bp, synthetic construct
  source 1..110: mol_type = other DNA
gcgccaggctaaggagccaggaagttatcccgagagcgacagggaattattgaagggtgttaagtgggtgagcggttcagtcctctgagcattttggaaaggccatgccc

SEQ ID NO: 70282 - DNA, 110 bp, synthetic construct
  source 1..110: mol_type = other DNA
tacacgatctccacggcggtctgggactttcttttttcatctttttctctccttccctctttgaaagaggcatggttttctgtggcgccagtgggaggggtttgaccatc

SEQ ID NO: 70283 - DNA, 110 bp, synthetic construct
  source 1..110: mol_type = other DNA
cctctttgaaagaggcatggttttctgtggcgccagtgggaggggtttgaccatctgcgtggctgtggcaagagatggcacccgtgcccggacagagacactgccctggc

SEQ ID NO: 70284 - DNA, 110 bp, synthetic construct
  source 1..110: mol_type = other DNA
ccagttaatttcaagccaccagcaccctctgtccctactaccgtcttgctggaggtataaattcccaggagacccccaggaagtgccaggaagatgaagctgcaatgcga

SEQ ID NO: 70285 - DNA, 110 bp, synthetic construct
  source 1..110: mol_type = other DNA
tataaattcccaggagacccccaggaagtgccaggaagatgaagctgcaatgcgacttcgtaatttcactcacattaactgacacacccttcaaggcctctgaccatttg

SEQ ID NO: 70286 - DNA, 110 bp, synthetic construct
  source 1..110: mol_type = other DNA
caccataagatgttctagcagaaaagtcatcagcaaggctgttgtgggatattacacttcaacaaacccaaagaaagctctagaaagtgcttttctaggttccttttgca

SEQ ID NO: 70287 - DNA, 110 bp, synthetic construct
  source 1..110: mol_type = other DNA
gggcctttcacttctctctcctcccgggagggtctgagctctgagtaggagggttgtttgcagcaaatgccacgtgtctttgtatatttatgtgtttacttttttttttt

SEQ ID NO: 70288 - DNA, 110 bp, synthetic construct
  source 1..110: mol_type = other DNA
gcccccccagtaggggctggcactcagtgacagcatttctgagctccagttctttgggacccctcccctgctccagccacccggcctgggccagggccttgtggcacagg

SEQ ID NO: 70289 - DNA, 110 bp, synthetic construct
  source 1..110: mol_type = other DNA
gcctagctcccatgggccggggccagctggacccagcactctctgtgtgacaacaaggaatgacggacaaagtaagtgtgggaggtctgctcccccgtcaagatgtaaga

SEQ ID NO: 70290 - DNA, 110 bp, synthetic construct
  source 1..110: mol_type = other DNA
attcaaaaaggcagcgtccggagaacttggaatgccagaaaagcaatctaggcaagtttctttcttgtgtgtcttctgtgtgggcctggtccttgtcactgtcatgtctc

SEQ ID NO: 70291 - DNA, 110 bp, synthetic construct
  source 1..110: mol_type = other DNA
cccttgcacgtgtccatggtagtaacagtgaccctgaaaggaggagaaagtaggttcagtcatgtctgctcatgtccactcacgatcgaccagctgcctccagccaccct

SEQ ID NO: 70292 - DNA, 110 bp, synthetic construct
  source 1..110: mol_type = other DNA
tcagtcatgtctgctcatgtccactcacgatcgaccagctgcctccagccaccctgctttcagctacagaattctcttttgcataaagtatcaaggctgtagttgtcata

SEQ ID NO: 70293 - DNA, 110 bp, synthetic construct
  source 1..110: mol_type = other DNA
ccccgcccctccctgctgcaggtggacagggaggccacagcagggaatgacagagccagctggagccctcagtcagaaataggctgaggacgaaattcagggggaaacca

SEQ ID NO: 70294 - DNA, 110 bp, synthetic construct
  source 1..110: mol_type = other DNA
caaatgctacagtcctatcccagctttcatgacaaatatagcaaaacacaaaacgaggaatcttttggtcaaactgcaggcccgtatccctgatgccctagcaagggaag

SEQ ID NO: 70295 - DNA, 110 bp, synthetic construct
  source 1..110: mol_type = other DNA
agatgtgaccaagaatgagatagatctccttgtgctgaagccgaaggatctcttcaggcacgttcctaggtgataaatgcgagctgtgggacagtaggaatggaaagata

SEQ ID NO: 70296 - DNA, 110 bp, synthetic construct
  source 1..110: mol_type = other DNA
cctcctggcacagccccgaggcacttcataaagaaaatctatcttaactctttaagtccctggggatactgctgagtcatccagctttatttctgcaagtaactaagaag

SEQ ID NO: 70297 - DNA, 110 bp, synthetic construct
  source 1..110: mol_type = other DNA
tctttcggatgagggtcagtcggtcggacccacagtaacccagggtgaagtgtgaggacttggtggcagagagagccctggatctggggtcggatgcccggaatccaggc

SEQ ID NO: 70298 - DNA, 110 bp, synthetic construct
  source 1..110: mol_type = other DNA
ggacttggtggcagagagagccctggatctggggtcggatgcccggaatccaggctggggcagcacctagggccaccttcttggcctcaggggggctgcaggcccttccc

SEQ ID NO: 70299 - DNA, 110 bp, synthetic construct
  source 1..110: mol_type = other DNA
tgccttcgtgtgacaaaagtggatcttagctgtgaccttgagcatgacctgccgcgtggcggtggctcgtggcagacccccaccttccaagagaagccgtcgatttttca

SEQ ID NO: 70300 - DNA, 110 bp, synthetic construct
  source 1..110: mol_type = other DNA
ctaatgccattccctcgccccttcctgaccagaaaccctaagccacagttctgcccacgtgttagaatctgctcagctcgcgtctcaatgccccatcccactgggtcatg

SEQ ID NO: 70301 - DNA, 110 bp, synthetic construct
  source 1..110: mol_type = other DNA
actggccaggccatcacctgccggtcggctcctcacacatcaaagtctctgatgcgtctctgcccacctcacagcccccctgtgtgtcagaacttgtccccagcctggac

SEQ ID NO: 70302 - DNA, 110 bp, synthetic construct
  source 1..110: mol_type = other DNA
tcttctccttgggcgtccttggccgcctcttaattcctgttatgtgttctacgaagtccagactctgttctggagcttcctgtgaccctgcagtgcctctgtccccaccc

SEQ ID NO: 70303 - DNA, 110 bp, synthetic construct
  source 1..110: mol_type = other DNA
gggcagggcctccacggggatcaggtccacacttggttcacacttgacctcggaagcggctccggatctcctcccagctggcgtcttggcagaactttctttggattcga

SEQ ID NO: 70304 - DNA, 110 bp, synthetic construct
  source 1..110: mol_type = other DNA
gcggctccggatctcctcccagctggcgtcttggcagaactttctttggattcgacgttctccttccccgattcaaaaggcctttcactgtccctcctctctccctccag

SEQ ID NO: 70305 - DNA, 110 bp, synthetic construct
  source 1..110: mol_type = other DNA
aatagacctaatcaccacagggcagtgacagaattactgccttgtgattccacaatgttctttatttttttgcttttaaagagggtggaacctatgggaagtaaacagct

SEQ ID NO: 70306 - DNA, 110 bp, synthetic construct
  source 1..110: mol_type = other DNA
tcagtaagggtgttggtaatttcttggcgaatgttggtcatggagagttgctcgtaaccatttaggtcaagagataatgaactccaaacgtctttgctctttgcctgttt

SEQ ID NO: 70307 - DNA, 110 bp, synthetic construct
  source 1..110: mol_type = other DNA
agcagacgtgtgtcaagacggctctggaggaaaggaagtcatgcaccacgctcgtgtgtgctttcacgaacgccggcactgtgatgcatgggatccatcaggggtcaatt

SEQ ID NO: 70308 - DNA, 110 bp, synthetic construct
  source 1..110: mol_type = other DNA
acagcacacccctgagatctctgccggccactggacaccagggagcccatacgctccacactgaggctcttgagaactttgaggctctattccaaccatttctggggggt

SEQ ID NO: 70309 - DNA, 110 bp, synthetic construct
  source 1..110: mol_type = other DNA
atccataggaatgtgcaaaaaacaatgagtaagcctctcccttaaagacataatttaatcctggagaaaaggcatcttgatcgggatcgcttcctctggggccaaaacaa

SEQ ID NO: 70310 - DNA, 110 bp, synthetic construct
  source 1..110: mol_type = other DNA
taatcctggagaaaaggcatcttgatcgggatcgcttcctctggggccaaaacaaagacacgttcacaacgctgtgaaaatgatggaaacccaaaatccaaccgcggcac

SEQ ID NO: 70311 - DNA, 110 bp, synthetic construct
  source 1..110: mol_type = other DNA
gccttttggttgagaaagacgaggccaggaaagagggtgaaacagaaaaagcttatctgtcctgtcacccaggaaacagcagctggaagcagccaacactcaaggccttg

SEQ ID NO: 70312 - DNA, 110 bp, synthetic construct
  source 1..110: mol_type = other DNA
ttcctggagtgttctctccctgcaacagcagcttttaatctgcactggtgttacagagagtagagtgatcgcagagaccagtcgcatcaaaacccctcccactgcatgac

SEQ ID NO: 70313 - DNA, 110 bp, synthetic construct
  source 1..110: mol_type = other DNA
gagagtagagtgatcgcagagaccagtcgcatcaaaacccctcccactgcatgacggagctgccctttccagatggagccctgattcctccccccaaaatctttaatata

SEQ ID NO: 70314 - DNA, 110 bp, synthetic construct
  source 1..110: mol_type = other DNA
gcaaggcgtggtgtgggcgtcctcattcatggtcggtgttgggatctgctctcgcagtagattattcttaaaaagcttgaaatatttttgcgtttctcaagtactgactg

SEQ ID NO: 70315 - DNA, 110 bp, synthetic construct
  source 1..110: mol_type = other DNA
cagtgggcacatggccaatgatttaagcagtcccgcctgtggaatgaggccccataaaccctcccaggacagggttcagagagcttcccagccggtggacatggggtcac

SEQ ID NO: 70316 - DNA, 110 bp, synthetic construct
  source 1..110: mol_type = other DNA
tctgatgctcgtccatcagtaggtgtgggtctacacccctccctttgagtctccgggggccaccgaccacttcccccagaagcacacagcagtgtcaacacctgtgactt

SEQ ID NO: 70317 - DNA, 110 bp, synthetic construct
  source 1..110: mol_type = other DNA
agctctgaggcctccagcaaggagtggccattcctctgatgattctgtatctcgcaggcattcattcaattcagcacatttcctgagtgtctaagactttgtttattcct

SEQ ID NO: 70318 - DNA, 110 bp, synthetic construct
  source 1..110: mol_type = other DNA
tctgccagggagacttccctgcttggaatccagcatcctaagactctgggagacgcggccagcttgtctccccctcgcgctccagctccctgaaggaccagaagcccaga

SEQ ID NO: 70319 - DNA, 110 bp, synthetic construct
  source 1..110: mol_type = other DNA
tgggggagccgatgggcatccagcccggggtgggggtggcgtcgagagagggcagctcaaaacacggagagctggagagaaacccaggatggagaggaacagggaggaca

SEQ ID NO: 70320 - DNA, 110 bp, synthetic construct
  source 1..110: mol_type = other DNA
ggtcaggaacgagacgtgacgcccaaagaaagccagagctgaccccgcggaagagtcaaggtttctgcagaagcgtcataaaaacttaacgagtaaattctgaacgagca

SEQ ID NO: 70321 - DNA, 110 bp, synthetic construct
  source 1..110: mol_type = other DNA
ggaccacaccctgcacccagtcactccctcgcccccagacgcaacctctcggtgcacctgccttacacgcccgggtgggaggagctgggtacagaagcaacagcgcctgt

SEQ ID NO: 70322 - DNA, 110 bp, synthetic construct
  source 1..110: mol_type = other DNA
acctgccttacacgcccgggtgggaggagctgggtacagaagcaacagcgcctgtgccgttataacctacaaatcctgttaggctgctccgacccccatccggttcccga

SEQ ID NO: 70323 - DNA, 110 bp, synthetic construct
  source 1..110: mol_type = other DNA
ctgggccacagttctgatgggggtaggggggaggcatgtccacactggtcacactctggtgccactctttgctcgtcactaacgtgggctctggctccgtgggtggtctg

SEQ ID NO: 70324 - DNA, 110 bp, synthetic construct
  source 1..110: mol_type = other DNA
ctggtgccactctttgctcgtcactaacgtgggctctggctccgtgggtggtctgcacagtgaccgtctgggaggagagcagaaggctgcaggaacgtgatgctgaacgt

SEQ ID NO: 70325 - DNA, 110 bp, synthetic construct
  source 1..110: mol_type = other DNA
tgcatctctgggctttaaagcagggcacactgctgaatattctagatagttgtacaggtacccaagtctcccttgtgagtggacattaaaaaaaaaaaaaaggcctgaag

SEQ ID NO: 70326 - DNA, 110 bp, synthetic construct
  source 1..110: mol_type = other DNA
aagtacagtctagaaaacatgaagtgatccgaagtgagagctcgctcactcaatggtttccaaggaggcatctgcctccatcctgcctggaggagcatcttgtagggaaa

SEQ ID NO: 70327 - DNA, 110 bp, synthetic construct
  source 1..110: mol_type = other DNA
tttatgagctttggtaccgcgcagcggcaggaagccaagtctgtacagcacagttgccttgtccaagggcaccagctgtgaactcccagctctgcagactccagcctcct

SEQ ID NO: 70328 - DNA, 110 bp, synthetic construct
  source 1..110: mol_type = other DNA
gagtcaaagattttagagcagggctttgtttgtttaaaagaacttgaaatgatttagtctacttttagaacagttaggtgacaggagcaaggttacaagctgtgagtgac

SEQ ID NO: 70329 - DNA, 110 bp, synthetic construct
  source 1..110: mol_type = other DNA
agtctacttttagaacagttaggtgacaggagcaaggttacaagctgtgagtgacctgacccggtcgttttctggtgcgctcgtgtaagcggtccgtcctggtcctagga

SEQ ID NO: 70330 - DNA, 110 bp, synthetic construct
  source 1..110: mol_type = other DNA
ttcttttcttttttttaatcaaatgtcctgacgctaaaaccacatcagagctgatagtggatctgacaagagttaggtggccgtctaactgacctctggtgactggggtg

SEQ ID NO: 70331 - DNA, 110 bp, synthetic construct
  source 1..110: mol_type = other DNA
agtggatctgacaagagttaggtggccgtctaactgacctctggtgactggggtgtgctggcggcagacccctggccaggccctcaccccatggggtggctgccgaccag

SEQ ID NO: 70332 - DNA, 110 bp, synthetic construct
  source 1..110: mol_type = other DNA
cccacccggccacctcgggggccggccaccccgccctcccccgcccaggtgacgttagctcacatgtgtccctttctcagtgctcctaaagcgagcgtccatcacccgca

SEQ ID NO: 70333 - DNA, 110 bp, synthetic construct
  source 1..110: mol_type = other DNA
acattagaaggtgcacagccggaaagcagcacaaagacagccgggggaagggtcgagaaaagatacaaggcggtgatttttgagtcatgaaatgccaaaaagctccgtat

SEQ ID NO: 70334 - DNA, 110 bp, synthetic construct
  source 1..110: mol_type = other DNA
aagggaagcaggtctgcctgctgcagacaggaggtagaaactgggaaggactctagttctcgacgccggccggttaacccgaaatgtgagcgttctcaggtgtaggctgc

SEQ ID NO: 70335 - DNA, 110 bp, synthetic construct
  source 1..110: mol_type = other DNA
aatctagactttgggggttgttcctactttagaaacgtctcttgtcgtctgtcatctgctgaaaggtcagccgtcagtcttgctgctttctcttcggagaaatacatctt

SEQ ID NO: 70336 - DNA, 110 bp, synthetic construct
  source 1..110: mol_type = other DNA
ctcaaacacccttagggtcaccgatgtcatttttcttgcatttctagagactctgttccattggggtttctgctctgagatccgtgagaatttccaagggtcccgagttg

SEQ ID NO: 70337 - DNA, 110 bp, synthetic construct
  source 1..110: mol_type = other DNA
tggcgtgggtggtgagtggtgtggctggcgtggcccggcctggctggcgtgggcggggagctgcagaagccgggccctgcagtctggggcgtgtgcatttgactgtgctt

SEQ ID NO: 70338 - DNA, 110 bp, synthetic construct
  source 1..110: mol_type = other DNA
gggagctgcagaagccgggccctgcagtctggggcgtgtgcatttgactgtgcttgagcccccgttcccggagtgcttcgggggctgcacctggcggccccgcttctgca

SEQ ID NO: 70339 - DNA, 110 bp, synthetic construct
  source 1..110: mol_type = other DNA
ttcttttccatcagctcgacattagccgcctgaaaacagatgttttaggagttcgagtgtgagcgctcacttccgggcctcctgggtgacagcaccgtgcagccagagcc

SEQ ID NO: 70340 - DNA, 110 bp, synthetic construct
  source 1..110: mol_type = other DNA
cgtttctgcatttggattctatatacattcctaagggaaaatctgtgattttctttatttgaagggctttggtattagggctcagctggcttcttagaagaaattggaaa

SEQ ID NO: 70341 - DNA, 110 bp, synthetic construct
  source 1..110: mol_type = other DNA
tatttgaagggctttggtattagggctcagctggcttcttagaagaaattggaaagctctctcttctttatatttttccaaaagccatgtaagatgagtggtgcttcctc

SEQ ID NO: 70342 - DNA, 110 bp, synthetic construct
  source 1..110: mol_type = other DNA
gaacatggacagaagcacccaaatgaggcacgtggacagaaggctgctctggacgccaagcaccgtgagccgctgcagaaagaaatcagggagaaggagatgggtggaat

SEQ ID NO: 70343 - DNA, 110 bp, synthetic construct
  source 1..110: mol_type = other DNA
agaatttcaactagagaggcttcctaggaaaagttttattatgtgaaagcaaataggaatagagaaaagacccattaactgggggactttgttctgtacaaactcagggg

SEQ ID NO: 70344 - DNA, 110 bp, synthetic construct
  source 1..110: mol_type = other DNA
ggtgggaggtgctggtccccactgcccagatcacagacctgcaattcagaggtaagcacagccatttactacagcacgaaacagagtggcgtttctcgcccaggagccag

SEQ ID NO: 70345 - DNA, 110 bp, synthetic construct
  source 1..110: mol_type = other DNA
ctctggagttctccaaaacagctgacagcttgtctggctctggagctctgccttaccctcccatgaacaattctcaaccccggacggacacagaactgcctgaggccctg

SEQ ID NO: 70346 - DNA, 110 bp, synthetic construct
  source 1..110: mol_type = other DNA
tgttaacgaaaatatgacacatcaaacctagtcattacatcctaaaagttctcacaaggaaaaaaagtgaacttgtgagggggcagacattagccgcacgcactgtgctc

SEQ ID NO: 70347 - DNA, 110 bp, synthetic construct
  source 1..110: mol_type = other DNA
aaggaaaaaaagtgaacttgtgagggggcagacattagccgcacgcactgtgctcatcattttgcagtagacaactatggatcactgtgtcctacaccggaagctaacat

SEQ ID NO: 70348 - DNA, 110 bp, synthetic construct
  source 1..110: mol_type = other DNA
accttctccttgcccccacacgtggctggtcaagctgcccccacggcgacgtcgtggggaaaccaggagagagcacacctgcgaggcgggctcagaagaacaagactggg

SEQ ID NO: 70349 - DNA, 110 bp, synthetic construct
  source 1..110: mol_type = other DNA
ggctgtgtgggccggcgcgtctgggacaaaggcctgggtcccggctccaggagcaactgatgtttcagcagatgctctgcggcctctggcgtgcagggacccctggagag

SEQ ID NO: 70350 - DNA, 110 bp, synthetic construct; identical to SEQ ID NO: 70349
  source 1..110: mol_type = other DNA

SEQ ID NO: 70351 - DNA, 110 bp, synthetic construct
  source 1..110: mol_type = other DNA
tgttgtggggctgagccttcgggagtgtaaggggaacacacaaaggcgtctgcatgaggacatcagccacagcactggtcacaactgccacacatgggagctgccctgag

SEQ ID NO: 70352 - DNA, 110 bp, synthetic construct
  source 1..110: mol_type = other DNA
gcacttggcctgcccctgaaggtgggctcggagaccagcgcaggccacagactcggctgggccggaatctgttcttattcgctcgtgaccccaaggtcagcatgcagttc

SEQ ID NO: 70353 - DNA, 110 bp, synthetic construct
  source 1..110: mol_type = other DNA
gctgggccggaatctgttcttattcgctcgtgaccccaaggtcagcatgcagttctctggcccccgtctccagaatgccaaccctgggccacgctgggtcccgtccactc

SEQ ID NO: 70354 - DNA, 110 bp, synthetic construct
  source 1..110: mol_type = other DNA
taccccaaagaaaaagggggcggcgcggggcagcctctggaactggaacattccctagcttcatctgcgcagcggtgaaagggcatggcacatgcgtaaatgggaatcga

SEQ ID NO: 70355 - DNA, 110 bp, synthetic construct
  source 1..110: mol_type = other DNA
cacacactttggggcatctcgggcgcaggtgacaagccccaaggccacagtgacggcgcaggcagctcctgtccctgagctcacacccaactgcgtgttacgaaaccacg

SEQ ID NO: 70356 - DNA, 110 bp, synthetic construct
  source 1..110: mol_type = other DNA
cccgtctccaggcgaggggagcctcgaggctctgctccctcccaccccccatctgtgcctgggccccttttgtgctgctgcagtcgggttaatgagctggaaaataccac

SEQ ID NO: 70357 - DNA, 110 bp, synthetic construct
  source 1..110: mol_type = other DNA
ctggctgccttaggctctaaggatgctctcccaggagctagcccatcaatggcgccatagtttggggccctcttccaggaagcgcacccagacttctcctctggatccca

SEQ ID NO: 70358 - DNA, 110 bp, synthetic construct
  source 1..110: mol_type = other DNA
agcgaccgaggcagaccagtgggggtggggtgggaggcagccagaggtggaggggctggttctctggagtgtagacaacacgcaaacatacttaacagtacacgtgaaat

SEQ ID NO: 70359 - DNA, 110 bp, synthetic construct
  source 1..110: mol_type = other DNA
ttagcagcgcctctccccaaatcttttaaagggcaggcactccttgcgcgcacgtttcagtggaggaaaccgccacttattctttcgactattttcagtctcccttcgct

SEQ ID NO: 70360 - DNA, 110 bp, synthetic construct
  source 1..110: mol_type = other DNA
ctgcgcctgaggcatgaactggccgcaagcaatggccccgttcgtgatgcgtagtctcttcagacctgcttttgttgtatctgtttgagttacacactcagattctcctc

SEQ ID NO: 70361 - DNA, 110 bp, synthetic construct
  source 1..110: mol_type = other DNA
aactctcggcccgctgtttgtgctgcccccagcagcttggtggcggatctggcggcgcccggaaggggctaccttccaagcacccctgaaccttttgcctcaaggtgggg

SEQ ID NO: 70362 - DNA, 110 bp, synthetic construct
  source 1..110: mol_type = other DNA
cgcccggaaggggctaccttccaagcacccctgaaccttttgcctcaaggtgggggtcaccgccagccttttctgcaaccccctcctcgaagagctgcgcctgggcagcg

SEQ ID NO: 70363 - DNA, 110 bp, synthetic construct
  source 1..110: mol_type = other DNA
ctttgtatattttggatacaagtcttttgtcagatgtatgtgttgcaaacattttctggtctgtagcatgtcttttcattcgtgtagctgtgtcttttgcagagcagaaa

SEQ ID NO: 70364 - DNA, 110 bp, synthetic construct
  source 1..110: mol_type = other DNA
ctggtctgtagcatgtcttttcattcgtgtagctgtgtcttttgcagagcagaaaattttaactttgataaaatccatcaacttttaatttcatgagttgtgcttttgct

SEQ ID NO: 70365 - DNA, 110 bp, synthetic construct
  source 1..110: mol_type = other DNA
ggccatcgcctctgtccccagcacagtcccccgcctctccatctgaaatgcacatggtcggcgaacaagctcccctcgaatgggaaaatgtgccgggtggggcagagtcg

SEQ ID NO: 70366 - DNA, 110 bp, synthetic construct
  source 1..110: mol_type = other DNA
ggaatttatttcatttctttgcatcatcttcagttttttttcaacaatgttttatagttttcagtgtataggcctcttacctccttagctaagtttactcctagatattt

SEQ ID NO: 70367 - DNA, 110 bp, synthetic construct
  source 1..110: mol_type = other DNA
cacccgcaacctcatggttcccagctggatttgttccgctgccacggcgggaatcctgatttctgctgtttgtttgaaaattctggacaacatgttcttgagcaccgctt

SEQ ID NO: 70368 - DNA, 110 bp, synthetic construct
  source 1..110: mol_type = other DNA
tttgggatcctactgtgtgatgaaggatttttgcatgtatgttcatgcttggaattgtcctgccatgtttttccttctttgttttactttggtttcaaaataataacggc

SEQ ID NO: 70369 - DNA, 110 bp, synthetic construct
  source 1..110: mol_type = other DNA
tgtcctgccatgtttttccttctttgttttactttggtttcaaaataataacggcctcatagaaggagacaggggggatttttccctctttctccaagggaggaatgatg

SEQ ID NO: 70370 - DNA, 110 bp, synthetic construct
  source 1..110: mol_type = other DNA
gtcggaaggctctgggctcctgacagccccaactgccacctgtctaatgctctcacccgctttgctccacctccacagcatcaaaatgcccatgggtcagcagggtgggc

SEQ ID NO: 70371 - DNA, 110 bp, synthetic construct
  source 1..110: mol_type = other DNA
cccgctttgctccacctccacagcatcaaaatgcccatgggtcagcagggtgggcttcctgcctgctggtcactgctggccctgtaattgctacacagcacacattgctt

SEQ ID NO: 70372 - DNA, 110 bp, synthetic construct
  source 1..110: mol_type = other DNA
gatgaacttttttgaaatttgtcaactcttttcctttctcttttcctcccccattgaatttgccagttgatttcccaaagtggagtgaaattcagatactgaatttccct

SEQ ID NO: 70373 - DNA, 110 bp, synthetic construct
  source 1..110: mol_type = other DNA
gaataaacatgaggtaggttatatttctgtccagccaaattcagtgctatagactgaatgtattttttcattagaacagtattctgttagtttattgacctaaggagact

SEQ ID NO: 70374 - DNA, 110 bp, synthetic construct
  source 1..110: mol_type = other DNA
ccagtgacgatcttgggaaccactctttctgacactgtggagttgttgctggaaagctgttattcacctccctgatttcttgttagaatggctcagacttaacccttgtg

SEQ ID NO: 70375 - DNA, 110 bp, synthetic construct
  source 1..110: mol_type = other DNA
gttggggcaaccttgttaggagattccaaagagacagtaaaacatggggggcagagccacaataagaagatttagtggtggaattaaaaggggagatgtcctttcattat

SEQ ID NO: 70376 - DNA, 110 bp, synthetic construct
  source 1..110: mol_type = other DNA
gccacaataagaagatttagtggtggaattaaaaggggagatgtcctttcattatattctgcgccattttttccagtctcatgacattggtttccaagtcatgtctgttt

SEQ ID NO: 70377 - DNA, 110 bp, synthetic construct
  source 1..110: mol_type = other DNA
tatagccaatattgtgtagtaactgtaaatggagtgtaccctttaaaaattgtataaaaattttatggtgttcccgtcgtggctcagtggttaacgaatctgactaggaa

SEQ ID NO: 70378 - DNA, 110 bp, synthetic construct
  source 1..110: mol_type = other DNA
cactaaagcctttaaatatttttttgtctgcatattttttttcattttcccacccaccattcttttaagagacaaacgtttctatatcagcatttcatttccctgcatat

SEQ ID NO: 70379 - DNA, 110 bp, synthetic construct
  source 1..110: mol_type = other DNA
tttcctataccactcctagaattagccatttcttcaaggtgccctttgattagaggttattcttagaaaccaagatctgggtcccagatctatttgttgttactgagatg

SEQ ID NO: 70380 - DNA, 110 bp, synthetic construct
  source 1..110: mol_type = other DNA
gttattcttagaaaccaagatctgggtcccagatctatttgttgttactgagatgtagttatttctagatcctcaactgagggctagaaaatacgtgtgtgtatactaac

SEQ ID NO: 70381 - DNA, 110 bp, synthetic construct
  source 1..110: mol_type = other DNA
ggtgttaaaatataatctgaattccttattgttatcggcaagtctctgtaatgctctgactcctgacaaactcatttcatcttcagctctcctgttgctcttctgcccct

SEQ ID NO: 70382 - DNA, 110 bp, synthetic construct
  source 1..110: mol_type = other DNA
gactgagcagcagcgctgcaggcctgctgatggcttgtctgcaggatgctcgctctggctgacttccaaccaaccagggaaggaaaaaaaaatctggcagtgcctctccc

SEQ ID NO: 70383 - DNA, 110 bp, synthetic construct
  source 1..110: mol_type = other DNA
aaaatatgtttgatccaatgtgttttgtgggaaagaaggttaaactgaggatgtgcgacctggcttccatcccttgctccctgtgtgggctgggtctgtccttttctgct

SEQ ID NO: 70384 - DNA, 110 bp, synthetic construct
  source 1..110: mol_type = other DNA
cgacctggcttccatcccttgctccctgtgtgggctgggtctgtccttttctgctcctggcttgtaccttctctgtgaacaaagatactggaccagcgagaataagattc

SEQ ID NO: 70385 - DNA, 110 bp, synthetic construct
  source 1..110: mol_type = other DNA
tattttcaaaaagaaaacattttcgaatgaagaggcttttcacctttggttttactgatagtcaacagacatttctaggtgaatcaaatgctaaggaaggactccttgtc

SEQ ID NO: 70386 - DNA, 110 bp, synthetic construct
  source 1..110: mol_type = other DNA
tgatagtcaacagacatttctaggtgaatcaaatgctaaggaaggactccttgtcattaagtcaaacttcggttgtctgaggggtaacgttttcttaacttgaagtttta

SEQ ID NO: 70387 - DNA, 110 bp, synthetic construct
  source 1..110: mol_type = other DNA
cggaagggactctatcatttcatatgtcagttccctgacctccagctctgctgcaggcaagggagcgggattgctgagggaggttttggtgattgttgctggtgtgtgtg

SEQ ID NO: 70388 - DNA, 110 bp, synthetic construct
  source 1..110: mol_type = other DNA
cccctcagagttcccccattattgcgttagctagccaagctctgagagtgaaacgagagcacttcctaagcccaggttatcagggtgatgggtatgctaagccatgtgac

SEQ ID NO: 70389 - DNA, 110 bp, synthetic construct
  source 1..110: mol_type = other DNA
aaagttgtgcactgcaaccagcaaaattacatattgtgaagtgattttattgtgattggttctttctgtagccaaagtacagagaagtttgggacaaggataaaacttca

SEQ ID NO: 70390 - DNA, 110 bp, synthetic construct
  source 1..110: mol_type = other DNA
gctgatgcattcccaagagctagacaaaacaaaataaaacaaaatcagtgcatcgcctgtcttccctctgggctggcagcaagcaatgggtgttttgggtgccatgcttt

SEQ ID NO: 70391 - DNA, 110 bp, synthetic construct
  source 1..110: mol_type = other DNA
tttcgctatgaaataagcaacagaggcgtctgcagagcacagagcgtgtcagtgaagcagaaataacagccgtgactgtttcgcgtgcagctggtgtacagagcggcagg

SEQ ID NO: 70392 - DNA, 110 bp, synthetic construct
  source 1..110: mol_type = other DNA
agcagaaataacagccgtgactgtttcgcgtgcagctggtgtacagagcggcaggcaagaagcagaagtccatcttcacctcagttccagatactcctgaccttttaaga

SEQ ID NO: 70393 - DNA, 110 bp, synthetic construct
  source 1..110: mol_type = other DNA
gagtgaggaccccacagccagcatggcctctgcttgcactggcacagggcagcacagcctttggttgatgagagcaaggaactaaaggattttgttgactctcagccggg

SEQ ID NO: 70394 - DNA, 110 bp, synthetic construct
  source 1..110: mol_type = other DNA
agcctttggttgatgagagcaaggaactaaaggattttgttgactctcagccgggaactcccttcaacaggattctgtgaggagtctgttgggagacccagaagttcaaa

SEQ ID NO: 70395 - DNA, 110 bp, synthetic construct
  source 1..110: mol_type = other DNA
aacgagcagcttctgtcaatgtaccttttttactaccttcccctcagtaccagtacaagaagaactacgagaagagtaaaggacactaccacacaatacccgataatctg

SEQ ID NO: 70396 - DNA, 110 bp, synthetic construct
  source 1..110: mol_type = other DNA
caagaagaactacgagaagagtaaaggacactaccacacaatacccgataatctggagcagcttcatctaaaagaggccacagaactacagagtatagtaagttgatgga

SEQ ID NO: 70397 - DNA, 110 bp, synthetic construct
  source 1..110: mol_type = other DNA
tagtataggtctacctgcttcaaacactgtataaagcattacactaacaaatctgactgcacccttatctactagtgcagctgaggaatgaacaggtatttctgtgaagt

SEQ ID NO: 70398 - DNA, 110 bp, synthetic construct
  source 1..110: mol_type = other DNA
tgtggcctcatgggttctctgcacctggcttgagcttttacttatccacacacaactattagcggtggtttgcccttttctgtgttatctgcacctagcaaagcctctgc

SEQ ID NO: 70399 - DNA, 110 bp, synthetic construct
  source 1..110: mol_type = other DNA
aggtgccaaattaccgttatgagcactccaggaaccagttaagcagttgcagcgccccaggtgagtgcaaagccatgaggaacataagaaagcaggtagggaagttcttc

SEQ ID NO: 70400 - DNA, 110 bp, synthetic construct
  source 1..110: mol_type = other DNA
acacagccacagcgacaccagctccgagccatatctaccacctatgctgcagcctgcagtaacattgcattcttaaccaagtgagcaaggccaaggatcaaaccgcatcc

SEQ ID NO: 70401 - DNA, 110 bp, synthetic construct
  source 1..110: mol_type = other DNA
gaatttttaagggacttcaagaacaatactcttcactttgcccagcatttcattccacatcttctaagctatttctcagagccaaatgtggtctttttcttgaactttcc

SEQ ID NO: 70402 - DNA, 110 bp, synthetic construct
  source 1..110: mol_type = other DNA
cacatcttctaagctatttctcagagccaaatgtggtctttttcttgaactttccttcacccagagtgccaagtgtaccccagttcctttcaagacatgccctttccaaa

SEQ ID NO: 70403 - DNA, 110 bp, synthetic construct
  source 1..110: mol_type = other DNA
atttttaccaatctaattgtgtgaagaagggatcctgttatgctttcaatttgtatttcttaggagtggaattgaacttctgcgtattagccagccatttgcctttctta

SEQ ID NO: 70404 - DNA, 110 bp, synthetic construct
  source 1..110: mol_type = other DNA
tttcttaggagtggaattgaacttctgcgtattagccagccatttgcctttcttattcaggctctctttgattctgaagctatgtatgtgtagtcccgtgtctctgtaga

SEQ ID NO: 70405 - DNA, 110 bp, synthetic construct
  source 1..110: mol_type = other DNA
tggtattgtggtaagaatgttgattaaatccacctgctttggagctgtccttattcttgaccttttccagcttgtttctcctgtcttactgtcaattttgtgcattttct

SEQ ID NO: 70406 - DNA, 110 bp, synthetic construct
  source 1..110: mol_type = other DNA
ttggctagagctactccctctctttctcactggatttgagaatctgggcagaggcattaaaccctgcttgtccttcttaccatgttcagtaagtccgcattactgtgtaa

SEQ ID NO: 70407 - DNA, 110 bp, synthetic construct
  source 1..110: mol_type = other DNA
attaaaccctgcttgtccttcttaccatgttcagtaagtccgcattactgtgtaagggtgtacttctctgctcttggcctcaccttggacctagaaaatcagtcttgagt

SEQ ID NO: 70408 - DNA, 110 bp, synthetic construct
  source 1..110: mol_type = other DNA
tccatcactgcatcatccagaaccaggtggtttcctcggccaggagagggaccatgaagagcattacagtagctgacttcctatctgttgtgactggaccaaggagatgg

SEQ ID NO: 70409 - DNA, 110 bp, synthetic construct
  source 1..110: mol_type = other DNA
ttaccatgtaggttaaagattatgatatcgtctaaatgcaagcagtcagagagtgtttctagggagctctaaattatgaagcaaattgtaatcaaatttacttactatgt

SEQ ID NO: 70410 - DNA, 110 bp, synthetic construct
  source 1..110: mol_type = other DNA
acagaaattctcttaagtctataggtcagtttggggagaactgctgtctgctgtctttgttgagtttccaatgtataaatatagatttttagattaaaaaaaatctctat

SEQ ID NO: 70411 - DNA, 110 bp, synthetic construct; identical to SEQ ID NO: 70410
  source 1..110: mol_type = other DNA

SEQ ID NO: 70412 - DNA, 110 bp, synthetic construct
  source 1..110: mol_type = other DNA
gcctggtgccgcctctcacttattctgcttgatctgaggtgttttacttcagcctctctgctgctctaagtgtacagtcttgttgggtgtgatagataaacacaataaca

SEQ ID NO: 70413 - DNA, 110 bp, synthetic construct
  source 1..110: mol_type = other DNA
ctctgctgctctaagtgtacagtcttgttgggtgtgatagataaacacaataacaaaacaaagccctttctgttttgtttgtagtcctagatcctttcctagcccagaat

SEQ ID NO: 70414 - DNA, 110 bp, synthetic construct
  source 1..110: mol_type = other DNA
tttgaagcacgaagaaaaatcagtgctaagctccttacatgtatctcttctctagtacatcaattatatactagagcacatagtacagaaacatcaattatgtttatttt

SEQ ID NO: 70415 - DNA, 110 bp, synthetic construct
  source 1..110: mol_type = other DNA
agaaccaaagtacagcggactggaaggggctctgagttaatcctgtgtccacggagcaaacctcagctaatttttgtaccagtggtttgaacccatgacctggatcttat

SEQ ID NO: 70416 - DNA, 110 bp, synthetic construct
  source 1..110: mol_type = other DNA
acctgaatgcttcagaaagccagccaccatgaacagcccataagaaaaggggctctttatctgggcctgaatggctttaaacttgtcatgataacacaagaaagaacttc

SEQ ID NO: 70417 - DNA, 110 bp, synthetic construct
  source 1..110: mol_type = other DNA
tttatctgggcctgaatggctttaaacttgtcatgataacacaagaaagaacttcctcaagaataaactaccttgaagagtgggaaaccaaacaaaactcataacctctt

SEQ ID NO: 70418 - DNA, 110 bp, synthetic construct
  source 1..110: mol_type = other DNA
cttctggggtggtcttatgcagtcctttcaatccctgagctggaaaactctcaatggctgcttgagtgagaacaaagcctctggctgaaaaattccacagagacattatt

SEQ ID NO: 70419 - DNA, 110 bp, synthetic construct
  source 1..110: mol_type = other DNA
ggttagcatgaagttggtgaaaagttctaagcactggtagtgaggaatcttattggtatctatgcagagatcatggaacccaatggaaacagcctgcagtggacaccaag

SEQ ID NO: 70420 - DNA, 110 bp, synthetic construct
  source 1..110: mol_type = other DNA
gtatctatgcagagatcatggaacccaatggaaacagcctgcagtggacaccaagtggacacgatattggtgaacagactctgccccaagacagcagttggtagtggagg

SEQ ID NO: 70421 - DNA, 110 bp, synthetic construct
  source 1..110: mol_type = other DNA
gaatagataggcatgtagagggcgggcacacatgacctgggatcgaggggcagagatgtggcccagaaactcctcgggaagctgagactccactagcaaggagataacag

SEQ ID NO: 70422 - DNA, 110 bp, synthetic construct
  source 1..110: mol_type = other DNA
ttgtgtgcttgttccgttcaggtttcttaatgaggcagatcagattccgatttgacgggcagccaatcaatgaaacagacgcacctgcacagttagaaatggagaatgaa

SEQ ID NO: 70423 - DNA, 110 bp, synthetic construct
  source 1..110: mol_type = other DNA
cgggcagccaatcaatgaaacagacgcacctgcacagttagaaatggagaatgaagctacaattgatgtatttcaacagcaggcaggaggtgtctactaaaaaggggacc

SEQ ID NO: 70424 - DNA, 110 bp, synthetic construct
  source 1..110: mol_type = other DNA
gatactccatcctgtgtgtaattgaggtcacgctaggcagaaaactgggacatctcaattatataatcccagttcagtcctatggtagcctttctattcacagcttcaat

SEQ ID NO: 70425 - DNA, 110 bp, synthetic construct
  source 1..110: mol_type = other DNA
caattatataatcccagttcagtcctatggtagcctttctattcacagcttcaatcttattctgtattgcccatttctaaaacaagaaatagcatatgtacttgtcttat

SEQ ID NO: 70426 - DNA, 110 bp, synthetic construct
  source 1..110: mol_type = other DNA
gaaactgagttggaaaatttattttctttcctcatcagactctcagctgctggacagggagagcttacatctttcctttttgtttttttttttcccactgtacagcatga

SEQ ID NO: 70427 - DNA, 110 bp, synthetic construct
  source 1..110: mol_type = other DNA
gtgaggtactctcagggttactcctaaagcccccctcctttggaaggaagtcgggggacaggcccctcaggccctccatgagcgggaaaggatgaatggccagcacacaa

SEQ ID NO: 70428 - DNA, 110 bp, synthetic construct
  source 1..110: mol_type = other DNA
ggacaggcccctcaggccctccatgagcgggaaaggatgaatggccagcacacaaacagctctccttttaaagaagtcttatcggtttttctgagacgggctcccccggg

SEQ ID NO: 70429 - DNA, 110 bp, synthetic construct
  source 1..110: mol_type = other DNA
caacaactattctttggcctggtgttttagagatacatgttgttctaccacaacggtacccactttgtttatccatctttaagttttatcctgctggtccctgttactga

SEQ ID NO: 70430 - DNA, 110 bp, synthetic construct
  source 1..110: mol_type = other DNA
cacagaagtaatatctgcaatgtgcaattcacagtgtggaaatgttggaatcatggcacagaggttagtacctttgggccaatgacatagtgagctttttaaacttgtgc

SEQ ID NO: 70431 - DNA, 110 bp, synthetic construct
  source 1..110: mol_type = other DNA
gcacagaggttagtacctttgggccaatgacatagtgagctttttaaacttgtgcttttttagtgagataaagtttgtcaaacacccacagaattcatgaccaagttcta

SEQ ID NO: 70432 - DNA, 110 bp, synthetic construct
  source 1..110: mol_type = other DNA
tgtctttcagagagacattgagagataaaagttgtggttttcagatgaatattgaaaaaggacagaattgaacaggagatggagtagagaaggatgagaaatgctatgaa

SEQ ID NO: 70433 - DNA, 110 bp, synthetic construct
  source 1..110: mol_type = other DNA
aaaaggacagaattgaacaggagatggagtagagaaggatgagaaatgctatgaaggctacaggaactgaactgggctgtggattggcatgtgaaaaggatttcaatacc

SEQ ID NO: 70434 - DNA, 110 bp, synthetic construct
  source 1..110: mol_type = other DNA
gcaacctaaatgtccatcaacaaaggaatggaatggtgtatatatagcatggaatatcattcagccataaaaagaatgaaataataccattttcagcaacatgctcagac

SEQ ID NO: 70435 - DNA, 110 bp, synthetic construct; identical to SEQ ID NO: 70434
  source 1..110: mol_type = other DNA

SEQ ID NO: 70436 - DNA, 110 bp, synthetic construct
  source 1..110: mol_type = other DNA
cagaaagaatatgcatctaagacgccaaattccccagaccgcttgctgtactactactgttccagtgacactgtatcactcaccgcaaacttcaaagcccagccctccta

SEQ ID NO: 70437 - DNA, 110 bp, synthetic construct
  source 1..110: mol_type = other DNA
aagtgtaaagccactgctctctagctttaaggtgggggcaaatatgaactgtttcagctctagagctaactatggggtcatcaaagcttatggattgactgcatcacatt

SEQ ID NO: 70438 - DNA, 110 bp, synthetic construct
  source 1..110: mol_type = other DNA
tcctcctctacaattgccatccaagagtcctaactactaccctattcttcccgcctgttactccaccctacgttgcacttgcggcatctcagggcttagaaaggcaccag

SEQ ID NO: 70439 - DNA, 110 bp, synthetic construct
  source 1..110: mol_type = other DNA
tgttactccaccctacgttgcacttgcggcatctcagggcttagaaaggcaccagtggagactgttcttgatggagtaatgtcctgttcccttgtaaatcaccagcagca

SEQ ID NO: 70440 - DNA, 110 bp, synthetic construct
  source 1..110: mol_type = other DNA
gtcccaacagtatttcaaaactaacttcaaaaaggatatattttatttttcattgcatttcaaatattaactgagagcttgattggttcatggtggaagaaggtgttagt

SEQ ID NO: 70441 - DNA, 110 bp, synthetic construct
  source 1..110: mol_type = other DNA
gggccaaactggcactgtaagttgaggggctggaggatcttcccagaagagtatattgagggagagaagaattaggtactgagacaccaagtcagctgcaaaaccatatt

SEQ ID NO: 70442 - DNA, 110 bp, synthetic construct
  source 1..110: mol_type = other DNA
ttgagggagagaagaattaggtactgagacaccaagtcagctgcaaaaccatatttgtgattttgagcacagaagcatagaagggcaacacccatgcaaatctacacctg

SEQ ID NO: 70443 - DNA, 110 bp, synthetic construct
  source 1..110: mol_type = other DNA
tgcagaagtaaacacggactatggactccactggtcccatcacatactgcatcgctgagaagctgccaggttgatatagcataaaatatctttggaagatgtactaaggt

SEQ ID NO: 70444 - DNA, 110 bp, synthetic construct
  source 1..110: mol_type = other DNA
tgcagagggaactgctctggtgacgtttcacacttagggtgagactgccagcaccaccaaggacttcatggccaaggaagtcaagtcagcaggacaccatttgaattcag

SEQ ID NO: 70445 - DNA, 110 bp, synthetic construct
  source 1..110: mol_type = other DNA
tccaacaggatggagagtcagcaaacgctagcttactgccttacctagaagaggtgtcacctactattttaagaaactattaaatcgttttaatcaccacacaattccca

SEQ ID NO: 70446 - DNA, 110 bp, synthetic construct
  source 1..110: mol_type = other DNA
agtcttatctttaggatggcagaataagctgagcccttggtctaggacttaacaataagggcagagaagcactagggaaagttgaattctcacttccagtcagtgctggg

SEQ ID NO: 70447 - DNA, 110 bp, synthetic construct
  source 1..110: mol_type = other DNA
taagaataaagatgataataataataacagaagttatcacttatgcttccccaaaccagacactactctaaccacttttgcacagaactcatttaatgaacagtttgtca

SEQ ID NO: 70448 - DNA, 110 bp, synthetic construct
  source 1..110: mol_type = other DNA
ccagacactactctaaccacttttgcacagaactcatttaatgaacagtttgtcactattactattattgttattattcccattttatggatgaggaaactgagagatgg

SEQ ID NO: 70449 - DNA, 110 bp, synthetic construct
  source 1..110: mol_type = other DNA
tactttaatcatgtcacctgcttaataaggctttgttatctcccactgctttcagtagcagttactaaactatcctcaagctataagtcattgttcaaagtctaaaaaaa

SEQ ID NO: 70450 - DNA, 110 bp, synthetic construct
  source 1..110: mol_type = other DNA
gggaacctcatttgtgcacctctctttgccagtaccctaccccataaattccaggtgattcaacagaccagaactcttgccttctttttctgcctcagctcggtcactcc

SEQ ID NO: 70451 - DNA, 110 bp, synthetic construct
  source 1..110: mol_type = other DNA
tgattcaacagaccagaactcttgccttctttttctgcctcagctcggtcactcctcaaacactatcactttgcttgggctccacttctttgtcatgcaaccagaaaagt

SEQ ID NO: 70452 - DNA, 110 bp, synthetic construct; identical to SEQ ID NO: 70450
  source 1..110: mol_type = other DNA

SEQ ID NO: 70453 - DNA, 110 bp, synthetic construct; identical to SEQ ID NO: 70451
  source 1..110: mol_type = other DNA

SEQ ID NO: 70454 - DNA, 110 bp, synthetic construct
  source 1..110: mol_type = other DNA
gaaattcccaggccagagattgaatctgagccatagctgccacctatgctatagctatggcaacgctggatcctttaatctttggcaccaggctggtattgaactgacac

SEQ ID NO: 70455 - DNA, 110 bp, synthetic construct
  source 1..110: mol_type = other DNA
tatggcaacgctggatcctttaatctttggcaccaggctggtattgaactgacacctctacagcaatccaagctactgcagttggatttttaaccccctgtgccacaatg

SEQ ID NO: 70456 - DNA, 110 bp, synthetic construct
  source 1..110: mol_type = other DNA
gcatattaaactgaatggatgtaccagaattgctttcacaaaatctctgttgttctttcaggttatttccagtattttgacattacagtcgacactgcagatgattttta

SEQ ID NO: 70457 - DNA, 110 bp, synthetic construct
  source 1..110: mol_type = other DNA
catgatgggtggaaaaaaatcaaatagaaatagaataataaaaaagaaagtaaaaatttccttcatctcctaggtccattcagtctctctatgaaaggtaaccataagga

SEQ ID NO: 70458 - DNA, 110 bp, synthetic construct
  source 1..110: mol_type = other DNA
atttccttcatctcctaggtccattcagtctctctatgaaaggtaaccataaggaatcctcttgtgtcttctttaaaacgtctaagcatgacaggcatatgcatctgttt

SEQ ID NO: 70459 - DNA, 110 bp, synthetic construct
  source 1..110: mol_type = other DNA
ctccagccttggtcctttttgttgctgaagccaaaggacaccaatctgagaccagcgtttaaacaaccgacagagctgcttctgaacacaaacttctagggaaagaaaga

SEQ ID NO: 70460 - DNA, 110 bp, synthetic construct
  source 1..110: mol_type = other DNA
ccagttctaccgggagctgctcttgcctcttctcagcctcctctctgtttgccaaacatggcacatagaccaatagctaaaattgcaggagtcatttaggtgaccttgaa

SEQ ID NO: 70461 - DNA, 110 bp, synthetic construct
  source 1..110: mol_type = other DNA
acatggcacatagaccaatagctaaaattgcaggagtcatttaggtgaccttgaaggaggaaggtacctgctgaagacagtgaatctaaatttaagaggctatctttctg

SEQ ID NO: 70462 - DNA, 110 bp, synthetic construct
  source 1..110: mol_type = other DNA
aaaaaaatctttaaaacataaatgttcgctttcaggaaggagagcttaggagttctcccttctaatcactcagtgattatatggggatggtgtgtgtggggttatggggg

SEQ ID NO: 70463 - DNA, 110 bp, synthetic construct
  source 1..110: mol_type = other DNA
ccagcagcattacttcctctagcttcacctgccaccatctacacaaccactgcacattcactgaggccaggacataacagtgcagtgtttgaataataaaaataataaag

SEQ ID NO: 70464 - DNA, 110 bp, synthetic construct
  source 1..110: mol_type = other DNA
cctgcatcttggccattcctaatttgggtttatttggtcactgaccaagatcttaggacagtgagaagagcatttaagagatgggcattagtaagacaggagctgtgtat

SEQ ID NO: 70465 - DNA, 110 bp, synthetic construct
  source 1..110: mol_type = other DNA
ggacagtgagaagagcatttaagagatgggcattagtaagacaggagctgtgtatgcccatgacacccaggggtcctgaaatgagcaggggaagaacacagtgttttttc

SEQ ID NO: 70466 - DNA, 110 bp, synthetic construct
  source 1..110: mol_type = other DNA
cattgcacccaacttgttcatctacagacatgtttcttctgttggtctttggcagaaagatgctgatgggagagtaggccattttctataagggtcacttcaggtggcca

SEQ ID NO: 70467 - DNA, 110 bp, synthetic construct
  source 1..110: mol_type = other DNA
catctaatttgataatcacccaattgagacagagactattctccatttttgcagaggagtacacaaaggttctataagggtggaaatgattaggccaaagctgcatggcc

SEQ ID NO: 70468 - DNA, 110 bp, synthetic construct
  source 1..110: mol_type = other DNA
ggagtacacaaaggttctataagggtggaaatgattaggccaaagctgcatggccagggaatcaaaaccaggctgtctgcacagctccaccaacaggctctaccccgatg

SEQ ID NO: 70469 - DNA, 110 bp, synthetic construct
  source 1..110: mol_type = other DNA
tctctgactccctctcattctaccctattgctattttcttccattcttgcctggccttgccaatgcttctttcctgattctctaaaccttacccccttcaacccacctcc

SEQ ID NO: 70470 - DNA, 110 bp, synthetic construct
  source 1..110: mol_type = other DNA
aaagatgcaggtaaagcacaggagtagctgaacctttaatctcatctcttatacccctaatttaattcaatgccatattggtgtgcctctagataggactggctgttttg

SEQ ID NO: 70471 - DNA, 110 bp, synthetic construct
  source 1..110: mol_type = other DNA
ggttgagtcctagttgagccgttccccagccatcccagctcgtcaacagatataggagttgtgatgtagaagaagccatctgggatgtgggtcctccagctattccagct

SEQ ID NO: 70472 - DNA, 110 bp, synthetic construct
  source 1..110: mol_type = other DNA
ttctcttctttggtaccattagcagtttggaagctgcctgtagtgctttaatctagaggagtgactggtgtggagattcccaggaccaggatggccttacaggtatgagg

SEQ ID NO: 70473 - DNA, 110 bp, synthetic construct
  source 1..110: mol_type = other DNA
tagcaccaacatttctcctgggctattatagtcacttcaatcgctgctgctgcggcttcaagagaagataaatcagaaggggttcttttagatggtctcaagtacaacac

SEQ ID NO: 70474 - DNA, 110 bp, synthetic construct
  source 1..110: mol_type = other DNA
agggaggtatccaagaggaaagactgaagctaaattgacatgatttggggtaaagtcaggaatccatgagagaaaagagagctcagaacagaaacatgaatggactaaca

SEQ ID NO: 70475 - DNA, 110 bp, synthetic construct
  source 1..110: mol_type = other DNA
aactttctggtttggccatcttttttattctgactacaataatcccaaccaccaagtgtgcatatgattataacacattcccttaatcttgaagacacaactaacttggt

SEQ ID NO: 70476 - DNA, 110 bp, synthetic construct
  source 1..110: mol_type = other DNA
aagatatctgaatatttccttagacattcaaatgtgactgatgccatcataaagaattatgttgtcttcacatatatgaggctcaaatgcccaaagtctccagaagctca

SEQ ID NO: 70477 - DNA, 110 bp, synthetic construct
  source 1..110: mol_type = other DNA
ttgatcaccagataaatgaaattatactgtatttactgtcttcttagcgtaacgtttttgagtttcatctatgatgctgtgtgtttcaccaattcattcctttttttatc

SEQ ID NO: 70478 - DNA, 110 bp, synthetic construct
  source 1..110: mol_type = other DNA
ctgtcttcttagcgtaacgtttttgagtttcatctatgatgctgtgtgtttcaccaattcattcctttttttatctgaatatatatcacaaaatgtttatcctattcagt

SEQ ID NO: 70479 - DNA, 110 bp, synthetic construct
  source 1..110: mol_type = other DNA
ccctctgggaaaggaccttaacctcaagcactttcagtcaatcacagtccaagagagaaccttgaaaatgttctgcaacactgattggttccataaaatatgcttgctgg

SEQ ID NO: 70480 - DNA, 110 bp, synthetic construct
  source 1..110: mol_type = other DNA
cctgtgggtcctggagggtctcctgggaaagtaagggtcagttggagtgcactgtggagacaaggacactggcagcagaggcccagggaatactcatcagtgtgagctcc

SEQ ID NO: 70481 - DNA, 110 bp, synthetic construct
  source 1..110: mol_type = other DNA
ggagacaaggacactggcagcagaggcccagggaatactcatcagtgtgagctcccccagagggcttcattttggcacagacctgcccctacccaacaggctgcaggttc

SEQ ID NO: 70482 - DNA, 110 bp, synthetic construct; identical to SEQ ID NO: 70480
  source 1..110: mol_type = other DNA

SEQ ID NO: 70483 - DNA, 110 bp, synthetic construct
  source 1..110: mol_type = other DNA
gggtctcctgggaaagtaagggtcagttggagtgcactgtggagacaaggacactggcagcagaggcccagggaatactcatcagtgtgagctcccccagagggcttcat

SEQ ID NO: 70484 - DNA, 110 bp, synthetic construct
  source 1..110: mol_type = other DNA
gttaaattgaaatttccttacagacggggaaggaattcaaaacatatagtcctcagtcatgcatttcaggcagcttgggaaacattttaaccaaactactgcaagttcag

SEQ ID NO: 70485 - DNA, 110 bp, synthetic construct
  source 1..110: mol_type = other DNA
cagacttattactgatgtaaagttttagtggtctgggtagaaaatcaaatcaaccacatttccttaaaccaaagcctaatctagagcaagactcaaactctcttcaattt

SEQ ID NO: 70486 - DNA, 110 bp, synthetic construct
  source 1..110: mol_type = other DNA
aggactcattaagaacccacctcacttgaagacctgtccttaatgattgttgagatgtaactaaaataaaaatgtcttccataagtgaattatgatcctttccaaaatat

SEQ ID NO: 70487 - DNA, 110 bp, synthetic construct
  source 1..110: mol_type = other DNA
aaaattaaatatcaaggagtaggcacaccattatgggacaattcggatttggatttgctttctcacatcactttatatcccaggatagaggctgtcatgtataggggaag

SEQ ID NO: 70488 - DNA, 110 bp, synthetic construct
  source 1..110: mol_type = other DNA
tgctttctcacatcactttatatcccaggatagaggctgtcatgtataggggaagtattccaattagttgaccaatggtctgtgaattcatatactggccatcatcttca

SEQ ID NO: 70489 - DNA, 110 bp, synthetic construct
  source 1..110: mol_type = other DNA
ttaatcaaagcaatcttgagaaagaatggagccgaggatatcaggctccctaacttcagactgtactacaaagcttccatcatcaaaacagtacagcactgtcacaaaga

SEQ ID NO: 70490 - DNA, 110 bp, synthetic construct
  source 1..110: mol_type = other DNA
tcagactgtactacaaagcttccatcatcaaaacagtacagcactgtcacaaagacagatatatagatcagtggagtaggacagaaagcctggaaataaacccacgctcc

SEQ ID NO: 70491 - DNA, 110 bp, synthetic construct
  source 1..110: mol_type = other DNA
ctgtagagacaatttttggctgagacaagctggcttctgagccagtgagacaaatatttagtactcttatttagactaaagataaaatactctgcaagtgcaaacattaa

SEQ ID NO: 70492 - DNA, 110 bp, synthetic construct
  source 1..110: mol_type = other DNA
tgagacaaatatttagtactcttatttagactaaagataaaatactctgcaagtgcaaacattaagaagggtcagaaaggagttcccatcgtggcacagtggaaatgaat

SEQ ID NO: 70493 - DNA, 110 bp, synthetic construct
  source 1..110: mol_type = other DNA
aacacatcatatgaaatggatcagtcatgcagcatggtgaccaggaaagaaatctgtgacatgttctgtagctaaatgctatgtgttaacatatgcacacacagacacac

SEQ ID NO: 70494 - DNA, 110 bp, synthetic construct
  source 1..110: mol_type = other DNA
gcatgatcccttgttagaccttcctgtgcagtaagaggcaagatccacctagactagaatgttttggatgcagtcaacttggtaaccaccaatgctttcggccatggcca

SEQ ID NO: 70495 - DNA, 110 bp, synthetic construct
  source 1..110: mol_type = other DNA
catggcattccttgtatttcctggcatttccagaccactgttgtacaagtagaggaaatggaagaaaggaaagacttgttcagaagggatgcttccaggctgtgccttaa

SEQ ID NO: 70496 - DNA, 110 bp, synthetic construct
  source 1..110: mol_type = other DNA
ggcaagccttcaaacagcacagaggacttagagatgcttgagagaaaactagatgagtcttgaaatacgagcttcagtgtaaacatccccaaagaccaagtggatgaaat

SEQ ID NO: 70497 - DNA, 110 bp, synthetic construct
  source 1..110: mol_type = other DNA
tccccaggcacaatttgttttttggttctgtcgacccactgaactttcttaatatctctgtactagcttctgcttcctcattccttcaaaaatatcttttgatcaatata

SEQ ID NO: 70498 - DNA, 110 bp, synthetic construct
  source 1..110: mol_type = other DNA
tgatgatagtttatttcctactctgagcataaaatttaacttcctgaggcatggactgagctacttccaatccttttctcagcacctgattacaattaacaacttcatta

SEQ ID NO: 70499 - DNA, 110 bp, synthetic construct
  source 1..110: mol_type = other DNA
aaggagacctgcagggagtgaaaaccacatattgcacagaagctaatggtctttggtcctagaagaaaaccaaaggatagtctctagtagaaataaatccaagaaatagt

SEQ ID NO: 70500 - DNA, 110 bp, synthetic construct
  source 1..110: mol_type = other DNA
agtaagttacatgaatatatggctcaaagcgccattatatctatcactggtgggccggtatttttccctgagtgtgcacctatggccccatagaggttcttaaaagccag

SEQ ID NO: 70501 - DNA, 110 bp, synthetic construct
  source 1..110: mol_type = other DNA
cggtatttttccctgagtgtgcacctatggccccatagaggttcttaaaagccagctgataaaggctgaaaaaactcaagtctgatttgcagatggatcagctcaatatg

SEQ ID NO: 70502 - DNA, 110 bp, synthetic construct
  source 1..110: mol_type = other DNA
ggtatgatgctccagcatttcttccaaggctagaatactccaagcactacacacctgtccagatgtcacccttcttcccagcagtctatggatttctgcagatcaagctt

SEQ ID NO: 70503 - DNA, 110 bp, synthetic construct
  source 1..110: mol_type = other DNA
tgtccagatgtcacccttcttcccagcagtctatggatttctgcagatcaagctttctctaagaacctgagtttgattctcaacccatggctatctacactctgcctcca

SEQ ID NO: 70504 - DNA, 110 bp, synthetic construct
  source 1..110: mol_type = other DNA
ctgaagactcaactggattagatactcaagttggctcacttgccagaataccatatggccaagagctcaactgaggctctcatctacagtggtgaagtctgactctctag

SEQ ID NO: 70505 - DNA, 110 bp, synthetic construct
  source 1..110: mol_type = other DNA
caaatatttgatggaaaagtcagagctatgtaaacttaccacggggatgaaataatgaaatttaggtataagcacctggctgttttccaggttctgggtaaagaaagcaa

SEQ ID NO: 70506 - DNA, 110 bp, synthetic construct
  source 1..110: mol_type = other DNA
catggcttgcttccttatctctttcaatcttttgctcagcaaagaattttatagcaactctatttaaataacaacctttcactcctaaaccttctctgcttcatttttct

SEQ ID NO: 70507 - DNA, 110 bp, synthetic construct
  source 1..110: mol_type = other DNA
acattgaggtcatgcagattctgaaaacaaattctattcctaggcttatacccgtattggtattatagctggaaataggtggcatgctcaaagatgattaaggagactct

SEQ ID NO: 70508 - DNA, 110 bp, synthetic construct
  source 1..110: mol_type = other DNA
taaaatatattttggaaaaatagacacttaagggctaggctaatgctcaaaacaccacttggaatgctatttctgttggaaaataatgtgtaaatttttgtgctgattct

SEQ ID NO: 70509 - DNA, 110 bp, synthetic construct; identical to SEQ ID NO: 70508
  source 1..110: mol_type = other DNA

SEQ ID NO: 70510 - DNA, 110 bp, synthetic construct
  source 1..110: mol_type = other DNA
agcatggttgcagtgcagatgcaaatccaaagagtaaactttcctggttgtcagtactctcaatctagctacttctggtggattttacttcacttccagttctagggtga

SEQ ID NO: 70511 - DNA, 110 bp, synthetic construct
  source 1..110: mol_type = other DNA
atgagtgaaataccacccttcaaggcctatttcaactctaccacagtgacttgaaatttttccctcctctgaacctctttgtgtttgtcaagtatggtcgaaaacttttt

SEQ ID NO: 70512 - DNA, 110 bp, synthetic construct
  source 1..110: mol_type = other DNA
atttttccctcctctgaacctctttgtgtttgtcaagtatggtcgaaaactttttgtctgttctaatgagtggacatgtctcacttctacataatttgggaccaaccatt

SEQ ID NO: 70513 - DNA, 110 bp, synthetic construct
  source 1..110: mol_type = other DNA
gaagcccattgctaaacaatagcaggaagacaaaatataactctgtactctgctcaaacctgtagtggtcagatctacctattacatttttaaaggattcacagacccaa

SEQ ID NO: 70514 - DNA, 110 bp, synthetic construct
  source 1..110: mol_type = other DNA
tggttgctttgtaattagctcaagataaaagaatggctgataagataaaacaagacagaaagataaattttattctgcacttgcattcagtttttcctacgaattcatct

SEQ ID NO: 70515 - DNA, 110 bp, synthetic construct
  source 1..110: mol_type = other DNA
accagtaattggcacagatagtctctgaatccaggcagtctgacaacctacactattaaagcctgagctaagaatgctatagaaactagactgattagagccagcaaact

SEQ ID NO: 70516 - DNA, 110 bp, synthetic construct
  source 1..110: mol_type = other DNA
aataaattaccctaaaacttaattgcttaaaataacacacagttaccatctcacagtttctgtaggttaggaatccatgcaggcttagctaaattctctgcttcagggcc

SEQ ID NO: 70517 - DNA, 110 bp, synthetic construct
  source 1..110: mol_type = other DNA
gtttctgtaggttaggaatccatgcaggcttagctaaattctctgcttcagggcctcttatcaagccatgaaggcatttggatttgtggtgtgatccaaaagctggattg

SEQ ID NO: 70518 - DNA, 110 bp, synthetic construct
  source 1..110: mol_type = other DNA
aactcattggtatctgaagagtagccagtccctacagtggcttatctctttacggaaaatatcatttggtctctgcggagcataagctatcaagcatggttccagaggcc

SEQ ID NO: 70519 - DNA, 110 bp, synthetic construct
  source 1..110: mol_type = other DNA
ttatgtactgtttagagctgcatttatactacaacagcagaattgagtgacagaaatctgcaaagccaaaaagattaattatttggctctttaaagaaaaaagttagcaa

SEQ ID NO: 70520 - DNA, 110 bp, synthetic construct
  source 1..110: mol_type = other DNA
tccatgagattcctttaagatctcgtttctataaattactaccctcatttaacatacttgacttgagtgctcttggcatcccaaagattttaacaaaatttgtaaataca

SEQ ID NO: 70521 - DNA, 110 bp, synthetic construct; identical to SEQ ID NO: 70520
  source 1..110: mol_type = other DNA

SEQ ID NO: 70522 - DNA, 110 bp, synthetic construct
  source 1..110: mol_type = other DNA
ttatattctgcgctgtggctaggttatttcattttaggactccaggtaacttataagtggtactacttatgcagaagagaaattgggttatttatctcttccggaaatca

SEQ ID NO: 70523 - DNA, 110 bp, synthetic construct
  source 1..110: mol_type = other DNA
aaatttttattgataacgagcagctacataattccattcttatactggccttataagttagaaagaaaggatgctgaccaagaagttgggaaagcccatgagcatcattg

SEQ ID NO: 70524 - DNA, 110 bp, synthetic construct
  source 1..110: mol_type = other DNA
gttcttgaatattatctgagttggagactaatcatggttcacaagtagtgttggtccgcaaccaacatgccagtcaaatagttgtcagaaatataagctagggctccaaa

SEQ ID NO: 70525 - DNA, 110 bp, synthetic construct
  source 1..110: mol_type = other DNA
ggtgaggccgaggtctcaggtgtcttgccccaagctggcacaataggaaggagaatggttaaccaatcttgggtgtgctcagtgagagctctgcctgggtgacgtctggg

SEQ ID NO: 70526 - DNA, 110 bp, synthetic construct
  source 1..110: mol_type = other DNA
tcgagtgatttagagtttgtttttatctgagggcctcattttccatgtacaccaacctgattagactaggaggaggaagctccagctccagctgtgaccaagagtcaacc

SEQ ID NO: 70527 - DNA, 110 bp, synthetic construct
  source 1..110: mol_type = other DNA
gaacacacttctaaaaataccaggcagaaaccttgggcttttcaagctgctttgaaatctctgtgccttttcagtgtttctcatttaaaggcgcactcagccttgctact

SEQ ID NO: 70528 - DNA, 110 bp, synthetic construct
  source 1..110: mol_type = other DNA
aatctctgtgccttttcagtgtttctcatttaaaggcgcactcagccttgctactgttgttaaagcaactgaggaggaggagctgaagaaataggcatgtaataggctga

SEQ ID NO: 70529 - DNA, 110 bp, synthetic construct
  source 1..110: mol_type = other DNA
gttacacagacacttacttatccagccccctctgactcattgaatatgcataaatgtgtgaactcaccagcagctctttgctttccagcttttttccccctaggttgcta

SEQ ID NO: 70530 - DNA, 110 bp, synthetic construct
  source 1..110: mol_type = other DNA
gtgtgaactcaccagcagctctttgctttccagcttttttccccctaggttgctactttctatgttatttccatttgtaagcacagcgtatcacaaaatattgggattaa

SEQ ID NO: 70531 - DNA, 110 bp, synthetic construct
  source 1..110: mol_type = other DNA
tgtttttctaagaataagatggcaaatctcatagaaccatgtcccattttatacggggaagcaatgaagaatgtcaattacttctaaatagctaattagaaagcaaaaat

SEQ ID NO: 70532 - DNA, 110 bp, synthetic construct
  source 1..110: mol_type = other DNA
ctccaggtttttacctgtacttgtgaacaactgggtatgagtcagaagctccataaacctctccttgggttttattaatttgttagagtggttcacagaattcaaaaaac

SEQ ID NO: 70533 - DNA, 110 bp, synthetic construct
  source 1..110: mol_type = other DNA
ctgttaccagaaaacattattcaacagagacttaaaatgcagggtaagtctcaaaataaaatggattttatcttctcccaatttcttagagtactaagaatgatatgttc

SEQ ID NO: 70534 - DNA, 110 bp, synthetic construct
  source 1..110: mol_type = other DNA
aagacttttttttcttttttttaaactgactaatactttgataaaatatgaaaatacctgacatcttctagagctgcactactaattatgctggaatgcagagcattgct

SEQ ID NO: 70535 - DNA, 110 bp, synthetic construct
  source 1..110: mol_type = other DNA
caagacatcacagaaatggaatggcctgcattaattatcttatatcttaaagatcaacaatgaaatctttgttcaagataaacttcagtatctctagttcttagtcagta

SEQ ID NO: 70536 - DNA, 110 bp, synthetic construct; identical to SEQ ID NO: 70535
  source 1..110: mol_type = other DNA

SEQ ID NO: 70537 - DNA, 110 bp, synthetic construct
  source 1..110: mol_type = other DNA
agtggagtcctcaaaccatttagatcagaatcaacaaggttcttataaaaatctggattcctgggcttaagtccgtgtttacataatgaaatcttagggtaggactcagg

SEQ ID NO: 70538 - DNA, 110 bp, synthetic construct
  source 1..110: mol_type = other DNA
gattcctgggcttaagtccgtgtttacataatgaaatcttagggtaggactcaggaaatctgcatttaacatgaattttgctgctcagtccctgatacaacaataatttc

SEQ ID NO: 70539 - DNA, 110 bp, synthetic construct
  source 1..110: mol_type = other DNA
ccacggttctcttctcccctcttggtggactgctggagttatattggaataactagtcaggggagcctgcctctgatctagcattaccctacaagtctgactctgctttt

SEQ ID NO: 70540 - DNA, 110 bp, synthetic construct
  source 1..110: mol_type = other DNA
gtcaggggagcctgcctctgatctagcattaccctacaagtctgactctgcttttctcttaacatcaaaaacaaaggacatttgattgagaataagcatcaaatagggag

SEQ ID NO: 70541 - DNA, 110 bp, synthetic construct
  source 1..110: mol_type = other DNA
tttgctggtgacaaatagcccaggggtagccatctgacccggtcatgaccaaagaagcacagggagacctgccaggggttttcggagattttcctccctgataaaaatta

SEQ ID NO: 70542 - DNA, 110 bp, synthetic construct
  source 1..110: mol_type = other DNA
gaaggctgagtctcagtgcccacccttgacctgagtgtcttaggtgtggtatcttgggcagtggttcctattgtctttgcagctctgtctttcctttgtcctcctcagtt

SEQ ID NO: 70543 - DNA, 110 bp, synthetic construct
  source 1..110: mol_type = other DNA
aatattgctaattagcagcatacagtaagtgagaaaaaacagcacttgtcctaaattcccagttctaggactctaaaccagagtgaaggagggcgggtttaaaagtcatt

SEQ ID NO: 70544 - DNA, 110 bp, synthetic construct
  source 1..110: mol_type = other DNA
cccactaggtagttctaatactcaggatctctcatgtagttgcagtcagatagtagtcttcctgaaggctttcttggtcacacgtcaggcagttggttcaggctcttggc

SEQ ID NO: 70545 - DNA, 110 bp, synthetic construct
  source 1..110: mol_type = other DNA
gtcttcctgaaggctttcttggtcacacgtcaggcagttggttcaggctcttggctggatctccacttcctcagagcatggtatctgaattccaagaataagcaccccaa

SEQ ID NO: 70546 - DNA, 110 bp, synthetic construct
  source 1..110: mol_type = other DNA
gattcctttcataatggaattcaggctgcagtctgtagtcaggctgttgcgctgttatcttaatagctttattaatcttttgagccactgtgtttttgtttttgttattc

SEQ ID NO: 70547 - DNA, 110 bp, synthetic construct
  source 1..110: mol_type = other DNA
tggtttcaattttcagcaataacattcttgagaaaaaagaatggagctggaggaatcacactccctggtttcaaactatactacaaagctatagcaatcaaaacagtggt

SEQ ID NO: 70548 - DNA, 110 bp, synthetic construct
  source 1..110: mol_type = other DNA
tcacactccctggtttcaaactatactacaaagctatagcaatcaaaacagtggtttgggcataaaccagacagaacagaatagagcccagaaatatacccatgcatgta

SEQ ID NO: 70549 - DNA, 110 bp, synthetic construct
  source 1..110: mol_type = other DNA
aaataagtaaataaataagaaacccaacacacattttgtttttcattcaacctctactgattgattgcaaggcactgagctaagtgctttataacccacctttcctcacc

SEQ ID NO: 70550 - DNA, 110 bp, synthetic construct
  source 1..110: mol_type = other DNA
tctttatggcctacttggtgtgcgtttgaaacaaatatcttacagccaaaattcacagcgttaactttaaattgactggtgagacccaggtaacctgcattctaacttta

SEQ ID NO: 70551 - DNA, 110 bp, synthetic construct
  source 1..110: mol_type = other DNA
cagcgttaactttaaattgactggtgagacccaggtaacctgcattctaactttaattgccatcatttaatatgaaggccagagtattcatttttattaccctactttct

SEQ ID NO: 70552 - DNA, 110 bp, synthetic construct; identical to SEQ ID NO: 70550
  source 1..110: mol_type = other DNA

SEQ ID NO: 70553 - DNA, 110 bp, synthetic construct; identical to SEQ ID NO: 70551
  source 1..110: mol_type = other DNA

SEQ ID NO: 70554 - DNA, 110 bp, synthetic construct
  source 1..110: mol_type = other DNA
agcagttacttggctgctctcagtgttctcacggagtggagaaaactgtcagggacagacttagcagggtagacctgagctatttaagcctacaaaagcagaaatcaaat

SEQ ID NO: 70555 - DNA, 110 bp, synthetic construct
  source 1..110: mol_type = other DNA
ttttctgtctgacttaagtcactgaacataatgccgtcagggcccatcggtgttgttacaaaaggcaggatttccttttcatggctgtataacattcctttgtgtgtgca

SEQ ID NO: 70556 - DNA, 110 bp, synthetic construct
  source 1..110: mol_type = other DNA
ttacaaaaggcaggatttccttttcatggctgtataacattcctttgtgtgtgcatttatatacacataccatatattctttatccatcactccactgatggacacttaa

SEQ ID NO: 70557 - DNA, 110 bp, synthetic construct
  source 1..110: mol_type = other DNA
tgtgaaatctgtgttttctccccacccagctggacatactgcagggctccagcgaattccttctgccttcctagggggtcagcatggcctccctgtagtgagcgacctat

SEQ ID NO: 70558 - DNA, 110 bp, synthetic construct
  source 1..110: mol_type = other DNA
gttctgagtgatatatcagtctgaatagcagagatactgttcaggactaaaaagaaccacctttagaccaggatcccggctgcgagcctgtcttctttgggcagcagagt

SEQ ID NO: 70559 - DNA, 110 bp, synthetic construct
  source 1..110: mol_type = other DNA
accacctttagaccaggatcccggctgcgagcctgtcttctttgggcagcagagtttggagggatccatcatatttatttattttttattttttattttttggtgttttt

SEQ ID NO: 70560 - DNA, 110 bp, synthetic construct
  source 1..110: mol_type = other DNA
tactgcctcacaatcagcgccagggtctgagagctgggagagttcctttggttttcctgctctgacttcggcagtctccacacaggggtctctcgtcagtcttgccatac

SEQ ID NO: 70561 - DNA, 110 bp, synthetic construct
  source 1..110: mol_type = other DNA
cctgctctgacttcggcagtctccacacaggggtctctcgtcagtcttgccataccccaatcagccctgtgggcacttagtgaaggcttgtggaaagagttggtgtgtag

SEQ ID NO: 70562 - DNA, 110 bp, synthetic construct
  source 1..110: mol_type = other DNA
ggccacctcttgcttttgggattgtctcttccaggcgggttgagaggaacaccgaaccaaccaagaaggcagcttagatgcctgcctatgacaggccctctgcttcctcg

SEQ ID NO: 70563 - DNA, 110 bp, synthetic construct
  source 1..110: mol_type = other DNA
tcactcatattaagtctacagatcggattaaacatttgactacagcttcgaccggaaataagcaaagacaaatgtccccctaatcccataggaagtgccacagcaaagcc

SEQ ID NO: 70564 - DNA, 110 bp, synthetic construct
  source 1..110: mol_type = other DNA
catttaatcacacactcattatctcacttaatctcttacccactctttcaccccattgccatccaaggaggagactggtgatgccacacccagattatgatgaaccccat

SEQ ID NO: 70565 - DNA, 110 bp, synthetic construct
  source 1..110: mol_type = other DNA
ttgccatccaaggaggagactggtgatgccacacccagattatgatgaaccccatagaagctggctatgttccaccttggtaaatccagtctgtctccattttcaatgat

SEQ ID NO: 70566 - DNA, 110 bp, synthetic construct; identical to SEQ ID NO: 70564
  source 1..110: mol_type = other DNA

SEQ ID NO: 70567 - DNA, 110 bp, synthetic construct; identical to SEQ ID NO: 70565
  source 1..110: mol_type = other DNA

SEQ ID NO: 70568 - DNA, 110 bp, synthetic construct
  source 1..110: mol_type = other DNA
atgaagagttgtgagagaaattatctcttggattgatagaagtccaactcttacgacaaggcatgaaatgaagatacaaacagaatacattggtccgaaataagggaaaa

SEQ ID NO: 70569 - DNA, 110 bp, synthetic construct
  source 1..110: mol_type = other DNA
gtctctatgggcaagacatattacatcagaacttcaattctgtccctctccagggacgtcattaaaattgaacgtatcttaaatctctgactctgtaaagctaattttga

SEQ ID NO: 70570 - DNA, 110 bp, synthetic construct
  source 1..110: mol_type = other DNA
ctctccagggacgtcattaaaattgaacgtatcttaaatctctgactctgtaaagctaattttgataaagaaatgcatcaacacataataaacaagtaaaaggggacaat

SEQ ID NO: 70571 - DNA, 110 bp, synthetic construct; identical to SEQ ID NO: 70569
  source 1..110: mol_type = other DNA

SEQ ID NO: 70572 - DNA, 110 bp, synthetic construct; identical to SEQ ID NO: 70570
  source 1..110: mol_type = other DNA

SEQ ID NO: 70573 - DNA, 110 bp, synthetic construct
  source 1..110: mol_type = other DNA
caagccaggaaatttgcaagtcccccctagccctgccactgatcctgcctttgaagtgctcctcttggtccttctctgagctcctattacatgccaggcactttcccaca

SEQ ID NO: 70574 - DNA, 110 bp, synthetic construct
  source 1..110: mol_type = other DNA
gtgctcctcttggtccttctctgagctcctattacatgccaggcactttcccacaattcatttctttcaggcctcacaatgctacaaggggattttattaccccatttta

SEQ ID NO: 70575 - DNA, 110 bp, synthetic construct
  source 1..110: mol_type = other DNA
acttgaggtcagacaagacaagatgattggccagaggaaactgagaagaactgtccctgtgtaagaaatttaaaccacacccaaagtgcgcagttctctctctctcagcc

SEQ ID NO: 70576 - DNA, 110 bp, synthetic construct
  source 1..110: mol_type = other DNA
ctgtatctgcgcctctccagagcaagatcctgtgctctacctgtggggggagtggggtagggtaaagagggaggcccagccagtagctgcttagatcttaaagaggtgca

SEQ ID NO: 70577 - DNA, 110 bp, synthetic construct
  source 1..110: mol_type = other DNA
ggtagggtaaagagggaggcccagccagtagctgcttagatcttaaagaggtgcaggttctcaatatagaacccagtgaccaatgcagtgcttactttcaactacagctt

SEQ ID NO: 70578 - DNA, 110 bp, synthetic construct
  source 1..110: mol_type = other DNA
ttaattaattcctttgattaacttccttaaagtagaattgtagggtcaaaaagtgttcacactttaaagaaagctcaggagtgtcctcatgtttgtgtgctgtacatatg

SEQ ID NO: 70579 - DNA, 110 bp, synthetic construct
  source 1..110: mol_type = other DNA
tagctggtggtcttgcatttgctcctgtatctccaaagaatttccccttatttacaggagtgaagtgaccttgacttgcagaagttctcatgtctgtttgagctcaagtc

SEQ ID NO: 70580 - DNA, 110 bp, synthetic construct
  source 1..110: mol_type = other DNA
aggagtgaagtgaccttgacttgcagaagttctcatgtctgtttgagctcaagtcttcttatgccattctctttcttattaccacttagaattttgtactacatgtcctt

SEQ ID NO: 70581 - DNA, 110 bp, synthetic construct
  source 1..110: mol_type = other DNA
tctatattgctcttaaagctattatacatgtaaagatattacacatcgtggtgcctatgtgtccatgttttcgatagtatactcacctaagagtgaaattacttagtcac

SEQ ID NO: 70582 - DNA, 110 bp, synthetic construct; identical to SEQ ID NO: 70581
  source 1..110: mol_type = other DNA

SEQ ID NO: 70583 - DNA, 110 bp, synthetic construct; identical to SEQ ID NO: 70581
  source 1..110: mol_type = other DNA

SEQ ID NO: 70584 - DNA, 110 bp, synthetic construct; identical to SEQ ID NO: 70581
  source 1..110: mol_type = other DNA

SEQ ID NO: 70585 - DNA, 110 bp, synthetic construct
  source 1..110: mol_type = other DNA
gctctaacacctcaaaggtgagagtgagaggtaatgataatcctaggacctagggtaccaaggtctatgcaccatctttgttttaactataactagtgtgcagcaaacac

SEQ ID NO: 70586 - DNA, 110 bp, synthetic construct
  source 1..110: mol_type = other DNA
taccaaggtctatgcaccatctttgttttaactataactagtgtgcagcaaacacaagtgaatatcctacaatgttttcatagtctagactgaactttcggtattgatat

SEQ ID NO: 70587 - DNA, 110 bp, synthetic construct
  source 1..110: mol_type = other DNA
aactgatttgagcattaactctttacagggcattaaccaaatagattagtcagctttatttttttgttgttcttgttcttttctttttagggctgcacctggggcatgtg

SEQ ID NO: 70588 - DNA, 110 bp, synthetic construct; identical to SEQ ID NO: 70587
  source 1..110: mol_type = other DNA

SEQ ID NO: 70589 - DNA, 110 bp, synthetic construct
  source 1..110: mol_type = other DNA
acttgactatgtttaaagattgaagctgtcactttggaagaggatatgtcttggctggcctggaagagcaggggtggtggtaggagcagcagcaaaccatctagaaccag

SEQ ID NO: 70590 - DNA, 110 bp, synthetic construct
  source 1..110: mol_type = other DNA
tggcctggaagagcaggggtggtggtaggagcagcagcaaaccatctagaaccagctgccttaggggttgctatcccccacatacctttcatgtttcactccaggttacc

SEQ ID NO: 70591 - DNA, 110 bp, synthetic construct
  source 1..110: mol_type = other DNA
agctttgtggtaactttgagttttagataaaataactgccttgtattaaccatgactattccatgttgccacttgaagttaagagagtgaagaagaagatggatctgaat

SEQ ID NO: 70592 - DNA, 110 bp, synthetic construct; identical to SEQ ID NO: 70591
  source 1..110: mol_type = other DNA

SEQ ID NO: 70593 - DNA, 110 bp, synthetic construct
  source 1..110: mol_type = other DNA
cacttgccctgttttttccctctaataccttcattgtgtattgagcaaggccctatggggttcctgggcataaaagcctttgtgtcccgcatttcttatttttaaggaat

SEQ ID NO: 70594 - DNA, 110 bp, synthetic construct
  source 1..110: mol_type = other DNA
tcagtccatacacagtgcattttcagagaggatgagatgaaccagctcacttctagccagttgattttgggcttaactatatgaatgcagaaacttgtcctagaattact

SEQ ID NO: 70595 - DNA, 110 bp, synthetic construct
  source 1..110: mol_type = other DNA
agattcatttctgctgagccataatgggaactcctcttcataatttatacaatcagccaataatattcatagaggacatgaaaacagctagcatgagtgaggtgctggct

SEQ ID NO: 70596 - DNA, 110 bp, synthetic construct
  source 1..110: mol_type = other DNA
gccaataatattcatagaggacatgaaaacagctagcatgagtgaggtgctggctctaatgctggtgaccaacagaacatgagaccctgaccagagacagctaattcaac

SEQ ID NO: 70597 - DNA, 110 bp, synthetic construct; identical to SEQ ID NO: 70595
  source 1..110: mol_type = other DNA

SEQ ID NO: 70598 - DNA, 110 bp, synthetic construct; identical to SEQ ID NO: 70596
  source 1..110: mol_type = other DNA

SEQ ID NO: 70599 - DNA, 110 bp, synthetic construct
  source 1..110: mol_type = other DNA
tactaaatttactttggtgttaactgctgtcctgaatactcattactgattggtatataaaaggctgatttcttaacacttgtccacagtacttaagacatacacacagc

SEQ ID NO: 70600 - DNA, 110 bp, synthetic construct
  source 1..110: mol_type = other DNA
tataaaaggctgatttcttaacacttgtccacagtacttaagacatacacacagcctctgctcccatttccatcaatacaagtaagttagtacaccatctacagagcagc

SEQ ID NO: 70601 - DNA, 110 bp, synthetic construct
  source 1..110: mol_type = other DNA
tggttatcaatgataaagatgagttggataaataatcaaaacacacaagcaaaagaagcaaggaaaagtgagatgtaaatgatcttctttttaccaactggctttctcta

SEQ ID NO: 70602 - DNA, 110 bp, synthetic construct; identical to SEQ ID NO: 70601
  source 1..110: mol_type = other DNA

SEQ ID NO: 70603 - DNA, 110 bp, synthetic construct; identical to SEQ ID NO: 70601
  source 1..110: mol_type = other DNA

SEQ ID NO: 70604 - DNA, 110 bp, synthetic construct; identical to SEQ ID NO: 70601
  source 1..110: mol_type = other DNA

SEQ ID NO: 70605 - DNA, 110 bp, synthetic construct
  source 1..110: mol_type = other DNA
ggaggcactggttcaatccccagctgggtgcatagggttaaggatccagctttacaggtctgtcttagattccatccctggcccatgaatatgctgcaggtgcagccgaa

SEQ ID NO: 70606 - DNA, 110 bp, synthetic construct
  source 1..110: mol_type = other DNA
gggatgaataattcatggtgccacatggaggtcttctttgagacttctctggaacacgcctgagccggctaaggaccagggagcttacaaacagtcacagtgtgctgtgt

SEQ ID NO: 70607 - DNA, 110 bp, synthetic construct
  source 1..110: mol_type = other DNA
acgcctgagccggctaaggaccagggagcttacaaacagtcacagtgtgctgtgtcaaagaacagtcaatcaatctccaaagaaatgtgaggagaacaggtttttcatgc

SEQ ID NO: 70608 - DNA, 110 bp, synthetic construct
  source 1..110: mol_type = other DNA
tccttggcctataatggaattggcctgggggcaattgctctttctgagggtgatactgacctgcaagccaaagctgcccatcagaattatgagatttttgttacttggaa

SEQ ID NO: 70609 - DNA, 110 bp, synthetic construct
  source 1..110: mol_type = other DNA
aagtccaggaacaagtaaagaatcctccatagaaagactggtgagtgtgcctcagtctcctgtgcagtaaggcctggggatggtagcctgcaaagaaccatctctcttat

SEQ ID NO: 70610 - DNA, 110 bp, synthetic construct
  source 1..110: mol_type = other DNA
atctttcagaactgccccagagctctcaagaatcaaaatactcttaaggttccaagtcagtataaacacattaaattttaactgactcctgaattttccaccccaacaga

SEQ ID NO: 70611 - DNA, 110 bp, synthetic construct
  source 1..110: mol_type = other DNA
aagactggaggttttaattggccagggctgtgatggacaagcttcatttgtgccaatattccattgggtagaattctgtcatatggcacacttactctgagggaggccag

SEQ ID NO: 70612 - DNA, 110 bp, synthetic construct
  source 1..110: mol_type = other DNA
agtctgggcaatgtcccagactaaggccctgagctgtccctcaataaggccttgctgtttcccaactaaagccctgactatccttaactaaggctctgcactgtccataa

SEQ ID NO: 70613 - DNA, 110 bp, synthetic construct
  source 1..110: mol_type = other DNA
aatatgtaatgtttatggataatatgttacaacatcttggatttgctttaagacaaccagcttgccatggggggctagttatgtgtatgtgttgggtatgtgaatcagga

SEQ ID NO: 70614 - DNA, 110 bp, synthetic construct
  source 1..110: mol_type = other DNA
atattggggtcaacctccgtccctcattcacaccgtggatggacacagacactagtgcacaagcttcccctgagcccctggctcatctcccataccccattccctgtgga

SEQ ID NO: 70615 - DNA, 110 bp, synthetic construct
  source 1..110: mol_type = other DNA
accctccactagaaaaaacccttgtatatcctggctcctccctttcttcattgaaaagggagctactgagaggctgtctcctgggctagagtcctcagtaagttcccagg

SEQ ID NO: 70616 - DNA, 110 bp, synthetic construct
  source 1..110: mol_type = other DNA
tttcacaagtttgtctgttttttaaaagaaactttaaaaagatacaagctattaaaaaattgcacaaactagttgccagcaccaaagcaggccacaggctgggtttaggc

SEQ ID NO: 70617 - DNA, 110 bp, synthetic construct
  source 1..110: mol_type = other DNA
gtaatggcatccatgtatcttcaaaatgagtgtttttcagcccagaccccaaataggcaatggcttttcccattagaagctacgaactatagccctttgcatcatcacaa

SEQ ID NO: 70618 - DNA, 110 bp, synthetic construct
  source 1..110: mol_type = other DNA
ggcaatggcttttcccattagaagctacgaactatagccctttgcatcatcacaaactgaagatgatggaagtcagggcaacaatcatttgggtaaatgggcagggagaa

SEQ ID NO: 70619 - DNA, 110 bp, synthetic construct
  source 1..110: mol_type = other DNA
tgcaggacaggggtccagtcttgcctgtcttgcctgtctctgcacccccaggtcctggcacagttggaggcatatactaggtgtgctctaaatttgctatattttgcccc

SEQ ID NO: 70620 - DNA, 110 bp, synthetic construct
  source 1..110: mol_type = other DNA
tggcacagttggaggcatatactaggtgtgctctaaatttgctatattttgccccacctactacctacatgacataaatgaggggtagtaagctaggatttccacccccc

SEQ ID NO: 70621 - DNA, 110 bp, synthetic construct
  source 1..110: mol_type = other DNA
tcattgtgttcatcaaacaaagtagtataagatcactgcatgacagaccacatttattagatgaagctgttttaccattattttattgtcttgctgtatcaaagccaggg

SEQ ID NO: 70622 - DNA, 110 bp, synthetic construct
  source 1..110: mol_type = other DNA
cttcttcactataaatgggtcccctagtcagcagctctgttgtatggaatttaatgcttgtggaccaggaactttgtcagtaccaatagtgaggatgattgaagttcagt

SEQ ID NO: 70623 - DNA, 110 bp, synthetic construct
  source 1..110: mol_type = other DNA
aaatcagcttcaatatttgcagacttcaaagaacatgaaatccaacaggagacgaaaatatttttgtgaatataagacacaggtcctttattgagtactggtgggggcga

SEQ ID NO: 70624 - DNA, 110 bp, synthetic construct
  source 1..110: mol_type = other DNA
cctgctcactgcttggactgtactggaccctcctagcaagctgtcctcactgaccccaaggtcctgtccctgccttttccaggaaggctctcaggacatgaaaatcaaag

SEQ ID NO: 70625 - DNA, 110 bp, synthetic construct
  source 1..110: mol_type = other DNA
ccttttcctaatgactagatccgttatttttcatccttaactcctgtaaactaggtttgagtttggccaacagaatgcagggtcagggtgggacacagcagtccaagcac

SEQ ID NO: 70626 - DNA, 110 bp, synthetic construct
  source 1..110: mol_type = other DNA
tggcatagtcactgttcaggatggccgtcatcagattatgcaacatgtttatgcctttatgtactggtgttttcctagggatgctcaggggtcaacgagcccagcctctt

SEQ ID NO: 70627 - DNA, 110 bp, synthetic construct
  source 1..110: mol_type = other DNA
cctgaatctcctctgccacccaggattccttatggccctcacactgtgccaccgtccactgtcagtaaggacaatctgagagaattatcattctgttctgggcattatat

SEQ ID NO: 70628 - DNA, 110 bp, synthetic construct
  source 1..110: mol_type = other DNA
aagacagcttgcattccatgaaactctctagagttcgaatggagagagaggagtttgagatttctggagaatgtgccacttggatttaggagtggtgggctctggaatca

SEQ ID NO: 70629 - DNA, 110 bp, synthetic construct
  source 1..110: mol_type = other DNA
acatttataatataataaatgccattgtaaatgtaaccacaagatgctctaaagaaaaagaagcaaggaaccttattctgtttagaaggcaggaaataaggctcaaagat

SEQ ID NO: 70630 - DNA, 110 bp, synthetic construct
  source 1..110: mol_type = other DNA
ctaaactttctagattctgcacaccttttgggaagctaagaattatttagcaaatttgcacactgttatcttcagtatttgtggtaagcatgttaatggccccaaagagg

SEQ ID NO: 70631 - DNA, 110 bp, synthetic construct
  source 1..110: mol_type = other DNA
agagaggcatacttgttaatatacatacaataacatttctttactttctactatctagctctcttttcttcactgttctcattgtgtacttcacaccaaagaacagtttc

SEQ ID NO: 70632 - DNA, 110 bp, synthetic construct
  source 1..110: mol_type = other DNA
atgcaagaagacattgcctgtcccttccactaaatttaccctctgtgtagtttagatacatgtttttctgagccctgggtttctgtaaaattgaatatgatagccaacat

SEQ ID NO: 70633 - DNA, 110 bp, synthetic construct
  source 1..110: mol_type = other DNA
gttttcagcagagggcctgatgtttaatcagtcctcagaaaatggtgtcaactatggacacaattaagagtaggccaccccagaaattgaaagttcaaaatccttccaaa

SEQ ID NO: 70634 - DNA, 110 bp, synthetic construct
  source 1..110: mol_type = other DNA
agactgtagtttctattagctgtgccttaaaatccttttcaaggaaaactattggtgtgacttctcagacacggcccttctcccccaatccaagaaaagaatatgaacca

SEQ ID NO: 70635 - DNA, 110 bp, synthetic construct
  source 1..110: mol_type = other DNA
tgtgacttctcagacacggcccttctcccccaatccaagaaaagaatatgaaccagaaaatcattttatgggaaatggaacataagatcaccaatactcataaaagcttt

SEQ ID NO: 70636 - DNA, 110 bp, synthetic construct
  source 1..110: mol_type = other DNA
ccagggacttgcccttgatccctccccatcccacacccaacacaacccaactccaggtggcctgtttatgagaacaatggtctttccacaagccaccaaagatggctggg

SEQ ID NO: 70637 - DNA, 110 bp, synthetic construct
  source 1..110: mol_type = other DNA
ccatcaacagccccacacctcccagcccctcttgggacacttagctctgtcttatgtccttatctgggccctcattaggtcccagcttccttgagggcctgtgcataatt

SEQ ID NO: 70638 - DNA, 110 bp, synthetic construct
  source 1..110: mol_type = other DNA
taccgtgtttcccacgttgggggcagggacaggtagggaccagctctcccaccgtgatgtcaccctcctgcgctacatgattgatgtgtgatatacacagaataccagag

SEQ ID NO: 70639 - DNA, 110 bp, synthetic construct
  source 1..110: mol_type = other DNA
taaatcagaacagtcgactatccacagtttcatgttgctcatttttccgagatgaagggttctgttcagtggtgtggtgaggtagaagttcgttgtgcagaatgtagtga

SEQ ID NO: 70640 - DNA, 110 bp, synthetic construct
  source 1..110: mol_type = other DNA
gaagggcctttgtgattatgctgggctcccccagataatccagagtcacctccgcatctcaaaacacttaattcaatcacacctgcaaagtcccatcagccgtaaggaat

SEQ ID NO: 70641 - DNA, 110 bp, synthetic construct
  source 1..110: mol_type = other DNA
tctatggggaactggtggttagaatgatgcatatggttagaatgatccaggctacaaacagcaggcactcattagttgcagtgcggcagacacgcacatggtgggtgcac

SEQ ID NO: 70642 - DNA, 110 bp, synthetic construct
  source 1..110: mol_type = other DNA
ctgccttctgtccctccagggagaggtgagcctgggaggagaaggagctggaaggtgggcggaaagaggggaccattgcctccacgtcccatcctcaatcagcagaggat

SEQ ID NO: 70643 - DNA, 110 bp, synthetic construct
  source 1..110: mol_type = other DNA
tgggcggaaagaggggaccattgcctccacgtcccatcctcaatcagcagaggatcaggactctggacagaactttctgtgaccatgacaatattccatatgtgtgccgt

SEQ ID NO: 70644 - DNA, 110 bp, synthetic construct
  source 1..110: mol_type = other DNA
cgtctcagaagcacatgaagtttggaacagaagatgccctctgtctctcattgtctcctgtgtgctcagctaagctgatctcgctgggagcctgcaacttggaggcggac

SEQ ID NO: 70645 - DNA, 110 bp, synthetic construct
  source 1..110: mol_type = other DNA
tcctgtgtgctcagctaagctgatctcgctgggagcctgcaacttggaggcggactccacgttctttcttcctctgacctcctctgagccctggtcaggctttgccagaa

SEQ ID NO: 70646 - DNA, 110 bp, synthetic construct
  source 1..110: mol_type = other DNA
caaatcctttcaaaaggaggttaaaatttaagagtattgatattattaatggagagaagactggagggaacccatttctgttactagccacctagtaaaaattatctcag

SEQ ID NO: 70647 - DNA, 110 bp, synthetic construct
  source 1..110: mol_type = other DNA
tggctcagtgataacgagccctgctagtatccatgagtatgcaagttcaatccctgatctcactcagtgagttaagactggcgttgccgtgagctatggtgtagttctca

SEQ ID NO: 70648 - DNA, 110 bp, synthetic construct
  source 1..110: mol_type = other DNA
agtatccatgagtatgcaagttcaatccctgatctcactcagtgagttaagactggcgttgccgtgagctatggtgtagttctcaaacttggcttggatctggagttgct

SEQ ID NO: 70649 - DNA, 110 bp, synthetic construct
  source 1..110: mol_type = other DNA
gagctcagggattgtaccagagggagccctcacctccctgaaaattccctgctgcaaacacagctctgagaatggcctccaggaagagaagtccaccccatattcttggc

SEQ ID NO: 70650 - DNA, 110 bp, synthetic construct
  source 1..110: mol_type = other DNA
aaacacagctctgagaatggcctccaggaagagaagtccaccccatattcttggcacccccagtacatgagccttctgggactgccataacagaggcagtttaaatcaac

SEQ ID NO: 70651 - DNA, 110 bp, synthetic construct
  source 1..110: mol_type = other DNA
tgccttccactcatggaaaatatttacagaaaatgttggtttattatataaatccacccccagggcttcaagccaccagcacgatgatgcattagctttaactttcctga

SEQ ID NO: 70652 - DNA, 110 bp, synthetic construct
  source 1..110: mol_type = other DNA
acccccagggcttcaagccaccagcacgatgatgcattagctttaactttcctgaatcgccctgcttctgaagatctgcatccaatccttggctggtttgttcttctaca

SEQ ID NO: 70653 - DNA, 110 bp, synthetic construct
  source 1..110: mol_type = other DNA
taatacattagaaagaaagagacagaaacagatggacttaaatcagctctacacgcttgcatgtgatgctaaagagactttatccaagcactgaaaaggctgggaatgat

SEQ ID NO: 70654 - DNA, 110 bp, synthetic construct
  source 1..110: mol_type = other DNA
atgctctgtcgcagacacagtcagtttggggaaggagatggcatgttattggcttctctcccagacagaatctgggacaggcactggagctgggatgggacgaagcccag

SEQ ID NO: 70655 - DNA, 110 bp, synthetic construct
  source 1..110: mol_type = other DNA
ctctcccagacagaatctgggacaggcactggagctgggatgggacgaagcccaggcccctctgagctgagcagcaccctgaagtctgaagtctatctcatgtttaatga

SEQ ID NO: 70656 - DNA, 110 bp, synthetic construct; identical to SEQ ID NO: 70654
  source 1..110: mol_type = other DNA

SEQ ID NO: 70657 - DNA, 110 bp, synthetic construct; identical to SEQ ID NO: 70655
  source 1..110: mol_type = other DNA

SEQ ID NO: 70658 - DNA, 110 bp, synthetic construct
  source 1..110: mol_type = other DNA
ccgatgacaaagcagttccttgagaattttgcctggaaactgggtgagtctgagcgtgcagggcatggggtcatctacctgcggcagaggagcttggagtcctctgtggt

SEQ ID NO: 70659 - DNA, 110 bp, synthetic construct
  source 1..110: mol_type = other DNA
gtgcagggcatggggtcatctacctgcggcagaggagcttggagtcctctgtggtcactgtcttgtggtctctgttcctttaagcgctcaggggaggccgtggacacctc

SEQ ID NO: 70660 - DNA, 110 bp, synthetic construct; identical to SEQ ID NO: 70658
  source 1..110: mol_type = other DNA

SEQ ID NO: 70661 - DNA, 110 bp, synthetic construct; identical to SEQ ID NO: 70659
  source 1..110: mol_type = other DNA

SEQ ID NO: 70662 - DNA, 110 bp, synthetic construct
  source 1..110: mol_type = other DNA
tgagaagaagcaggtgtgggattggctcccaccatggagaggtggcttgtgccaaagaccagctgttatctgagcagtggactaggaagttatggaaaagcaatgaacta

SEQ ID NO: 70663 - DNA, 110 bp, synthetic construct
  source 1..110: mol_type = other DNA
gtgggattggctcccaccatggagaggtggcttgtgccaaagaccagctgttatctgagcagtggactaggaagttatggaaaagcaatgaactaagtacctaagtaagt

SEQ ID NO: 70664 - DNA, 110 bp, synthetic construct
  source 1..110: mol_type = other DNA
gcacacctggcagagacgtgtgtccagatcggacatggggagctggcaggagatctgagagtgtggctggggtgacacacaagaaagagaggcttcaggacaagtgggct

SEQ ID NO: 70665 - DNA, 110 bp, synthetic construct
  source 1..110: mol_type = other DNA
tttggggccactctctgaaaatgagtttcctctgctggacttgaggttcctgtgaggcagctgaggcagcctgggaagggctcattgacaatttccaaggcctgggcatc

SEQ ID NO: 70666 - DNA, 110 bp, synthetic construct
  source 1..110: mol_type = other DNA
ggcagctgaggcagcctgggaagggctcattgacaatttccaaggcctgggcatctcttccatctagaaatgaactcagaactgtcctccttcctgtgggctactgatgg

SEQ ID NO: 70667 - DNA, 110 bp, synthetic construct
  source 1..110: mol_type = other DNA
atgatgaatttcccatgcagcccggaactggatccagatcccaaacaactgactggctggagattgaggccagccactctgagggtagagggaagatgcatgctgcactg

SEQ ID NO: 70668 - DNA, 110 bp, synthetic construct
  source 1..110: mol_type = other DNA
gctggagattgaggccagccactctgagggtagagggaagatgcatgctgcactgggaaggaggcaccgccgtggaccagacagtatccacatgggagacagacacggag

SEQ ID NO: 70669 - DNA, 110 bp, synthetic construct
  source 1..110: mol_type = other DNA
taaagtgaaattaaatagcaaggctagattttgaaggagatgctagggagggatatttaaacaggcacagattaagaggagagtttctaaagcagaattttaggcaaaaa

SEQ ID NO: 70670 - DNA, 110 bp, synthetic construct
  source 1..110: mol_type = other DNA
ctgcggtgaccccacttgcgtcttgccccgccccgtgagctccgctcactcaggctctgatttgttaccagctccgttagcactgttatgttttggctcatccgagtgtt

SEQ ID NO: 70671 - DNA, 110 bp, synthetic construct
  source 1..110: mol_type = other DNA
tctgatttgttaccagctccgttagcactgttatgttttggctcatccgagtgttttatttctaagtcttttttgatgtgaaacttcctcatttttgcacctcttccgaa

SEQ ID NO: 70672 - DNA, 110 bp, synthetic construct
  source 1..110: mol_type = other DNA
caaattagcaggatgttttcttgtgcaaatacctttgtgtgtgcccccatttctctaggtgtctgcagatctccatcctcccgtctctagatcacactaagcatctcagt

SEQ ID NO: 70673 - DNA, 110 bp, synthetic construct
  source 1..110: mol_type = other DNA
taggtgtctgcagatctccatcctcccgtctctagatcacactaagcatctcagtcttcctttcctgttacttgtggtctataattaagttttccccaaagtaaagtgtg

SEQ ID NO: 70674 - DNA, 110 bp, synthetic construct
  source 1..110: mol_type = other DNA
tgtttttcagggttactatggagcagatgtcacctgtgcgctaaccacaaacaccatggtcattagctccctgagcaacccagaacccaaacagattatccaggaaactg

SEQ ID NO: 70675 - DNA, 110 bp, synthetic construct
  source 1..110: mol_type = other DNA
aaaaaacacatctaaagaatgtgtgcagtgaggaactaatgccttacattcccactgacaatttgtactcatcccatcattagccccagctgtcactctgctggaaagtt

SEQ ID NO: 70676 - DNA, 110 bp, synthetic construct
  source 1..110: mol_type = other DNA
tgacaatttgtactcatcccatcattagccccagctgtcactctgctggaaagttcaccaaatctgacagcccatcaatggccttgtttcccagttgcctgctttgaagc

SEQ ID NO: 70677 - DNA, 110 bp, synthetic construct
  source 1..110: mol_type = other DNA
ggtatcctttggctagttatttaaactacagctcaggaagaggccaggtaaacaactcctaagaaagaaccttgaaaaggtcagaatggagggacctgggacaccatcca

SEQ ID NO: 70678 - DNA, 110 bp, synthetic construct
  source 1..110: mol_type = other DNA
gaggcaaaaaacaatagagtcatcacacccaagtcccctggaagcacagggctcttggcatttcccagtcttggtactactgccattcggagctggatctttgttctggg

SEQ ID NO: 70679 - DNA, 110 bp, synthetic construct
  source 1..110: mol_type = other DNA
tggcatttcccagtcttggtactactgccattcggagctggatctttgttctgggagcagtcctgtgtcttgaaggatgtttatttgtatctttggcctctgtcatcaaa

SEQ ID NO: 70680 - DNA, 110 bp, synthetic construct
  source 1..110: mol_type = other DNA
ggaagtcaaaacctgccagagcaaagttcatttacatgccaatactgtttttcctttaaataggaagctgttaatgaagccttaagaaggaagctctcactttctatgct

SEQ ID NO: 70681 - DNA, 110 bp, synthetic construct
  source 1..110: mol_type = other DNA
aaggaaccactttcttcctgaatcaccactttgtctacctacgttctacatgtagaggatagtttacatcttagggttatttctattctagtatctacttggctggaaga

SEQ ID NO: 70682 - DNA, 110 bp, synthetic construct
  source 1..110: mol_type = other DNA
aggatagtttacatcttagggttatttctattctagtatctacttggctggaagaagatggatgatggtgaggagctagtacttatttatctttacatcctcttcagtcc

SEQ ID NO: 70683 - DNA, 110 bp, synthetic construct
  source 1..110: mol_type = other DNA
aatgaaattcaaatatcacaaaaacagtctgttagtttcaattttgtgtgtccttcactttctgaatttggagggcctctcagccattctcaagctattgtgttgtctca

SEQ ID NO: 70684 - DNA, 110 bp, synthetic construct
  source 1..110: mol_type = other DNA
cactttctgaatttggagggcctctcagccattctcaagctattgtgttgtctcaatcaatcgtgtatgtgtgtactcacacagtgtgagatgttgccatgaatgcataa

SEQ ID NO: 70685 - DNA, 110 bp, synthetic construct
  source 1..110: mol_type = other DNA
cccattgcccatccatcccaaatataacagttccgttaaagttcttaaaatattaattgtgattattttaaacacagattggtcttacaattccaacatgtgtgccgtct

SEQ ID NO: 70686 - DNA, 110 bp, synthetic construct
  source 1..110: mol_type = other DNA
cagtggattttctttgatttctctatctatgacaatttgtatctccctttatagttcatgctatcaaaattatctcaatgtacccactactggctaatggcccaaacaag

SEQ ID NO: 70687 - DNA, 110 bp, synthetic construct
  source 1..110: mol_type = other DNA
tttttactgtccaccaaagagtacttcgggagagcattctgtgatagtaatccaccaaaaacacaatttggcagctaacagctaagtgtctgtggattccaaaaattacc

SEQ ID NO: 70688 - DNA, 110 bp, synthetic construct
  source 1..110: mol_type = other DNA
ctctctgaagtttctctagtttaactcagagggggataacatgggtagtgtttgatacatgtgggcatggaggccaaggcttcctcttgcccctacacccctgaaattaa

SEQ ID NO: 70689 - DNA, 110 bp, synthetic construct
  source 1..110: mol_type = other DNA
tacatgtgggcatggaggccaaggcttcctcttgcccctacacccctgaaattaaaataagcccgagtgcaggcatcacagagcaaggaagaattgcagaaggaggcagg

SEQ ID NO: 70690 - DNA, 110 bp, synthetic construct; identical to SEQ ID NO: 70688
  source 1..110: mol_type = other DNA

SEQ ID NO: 70691 - DNA, 110 bp, synthetic construct; identical to SEQ ID NO: 70689
  source 1..110: mol_type = other DNA

SEQ ID NO: 70692 - DNA, 110 bp, synthetic construct
  source 1..110: mol_type = other DNA
ctcactcccctacttcttcccaccacgaacactgtttacaagaaaacacaccccctcccgtctccccggcattttatcctgctggtctttcttccagggtcttggcccac

SEQ ID NO: 70693 - DNA, 110 bp, synthetic construct
  source 1..110: mol_type = other DNA
tcccgtctccccggcattttatcctgctggtctttcttccagggtcttggcccacatgagcttcttccctgcttccaaagccttcccatcccttgcgaccctacttttct

SEQ ID NO: 70694 - DNA, 110 bp, synthetic construct
  source 1..110: mol_type = other DNA
ccttcccactatttctgtcaggttcctcctcttcactgggacctccttccctggtgctgccaggggttcaggccatggttatctgtctgctttgctgctctcatcaagtc

SEQ ID NO: 70695 - DNA, 110 bp, synthetic construct
  source 1..110: mol_type = other DNA
gctgccaggggttcaggccatggttatctgtctgctttgctgctctcatcaagtcttagagctttcacctttaagtattattgcggctcctagatccacagagccaaacc

SEQ ID NO: 70696 - DNA, 110 bp, synthetic construct
  source 1..110: mol_type = other DNA
tctggttgaatgcatggcattacttctgatttctggctgaacaatacatggcttcttacctgtaatgaagtctccctttaccactagctcatccacaccttcctgaggca

SEQ ID NO: 70697 - DNA, 110 bp, synthetic construct
  source 1..110: mol_type = other DNA
ttacctgtaatgaagtctccctttaccactagctcatccacaccttcctgaggcagctgcgggacttggtacagccagatcagcaatgtcagggagaaagtagaccagcc

SEQ ID NO: 70698 - DNA, 110 bp, synthetic construct; identical to SEQ ID NO: 70696
  source 1..110: mol_type = other DNA

SEQ ID NO: 70699 - DNA, 110 bp, synthetic construct; identical to SEQ ID NO: 70697
  source 1..110: mol_type = other DNA

SEQ ID NO: 70700 - DNA, 110 bp, synthetic construct
  source 1..110: mol_type = other DNA
ctgctcagagaatctatcaatacttatcttcctgggcatccattccatttttttgccaaagtgtccttataccagctccttttatcccaatggcctgtttcctaacataa

SEQ ID NO: 70701 - DNA, 110 bp, synthetic construct
  source 1..110: mol_type = other DNA
ccaaagtgtccttataccagctccttttatcccaatggcctgtttcctaacataagtctctcacttcacgaccttgtctcttctctttcctgtgtcaaaacagaaacctt

SEQ ID NO: 70702 - DNA, 110 bp, synthetic construct
  source 1..110: mol_type = other DNA
tttccagtgaagtgaacaagaacatttaataaaacgagggctggggactggctacattttagtcagaagaggaaagtactgaactcctgatcaaagcttagccgggggag

SEQ ID NO: 70703 - DNA, 110 bp, synthetic construct
  source 1..110: mol_type = other DNA
ctgggtgaggtagttagagactttttagatactgacaattttaaaagatgctcgttctaaggaaagcttcttgtctttgagaggtaaagtagattcttatgtgtctcaaa

SEQ ID NO: 70704 - DNA, 110 bp, synthetic construct
  source 1..110: mol_type = other DNA
aaaggtcatagacataggtcttgcgtatcagatccaggtttaatcatgttatagagatttcaataatttttaaccaacactaaaaagtcattagatatcaggtcaaaatc

SEQ ID NO: 70705 - DNA, 110 bp, synthetic construct
  source 1..110: mol_type = other DNA
ggcccccacctatttaccatggccccagtggataaataaaaccatggataatagtacactctattatactgttttttttttttcaatacatatatacctatgatattttc

SEQ ID NO: 70706 - DNA, 110 bp, synthetic construct; identical to SEQ ID NO: 70705
  source 1..110: mol_type = other DNA

SEQ ID NO: 70707 - DNA, 110 bp, synthetic construct
  source 1..110: mol_type = other DNA
taaataatagactaggatcaagcaaaagaaagaatctatgaaggcaaatcattccacattattcacttagaggaaaacaaaggaaaatgaaagaaagagagcaaagaatg

SEQ ID NO: 70708 - DNA, 110 bp, synthetic construct
  source 1..110: mol_type = other DNA
caggaaatcaaagcacagagcccttaagcaacttcccagggccttgtggctagagttcaaatcccagcagacaatcaagctcttaagcacatactcaacctttccctgct

SEQ ID NO: 70709 - DNA, 110 bp, synthetic construct
  source 1..110: mol_type = other DNA
tggatcctttctcagcccttttatttgcatgtgtatgtgtctctcacaactcaggagtgcctttctcaaggacctgaaatgcaatcaggaaggacagagactctacctcc

SEQ ID NO: 70710 - DNA, 110 bp, synthetic construct
  source 1..110: mol_type = other DNA
gtggctgaactcaactccacctttaatcccttccccagaactcaggctaaactatagagggactcaccatgaattacctcattagcttatattaccaattattgtctgag

SEQ ID NO: 70711 - DNA, 110 bp, synthetic construct
  source 1..110: mol_type = other DNA
gcaaatgcttattgaatagatctacatgtaagatacatcattaaaagctctatgccatgacagaaaaatataaggtaaaatactaacaggagactcacaatctagttgtt

SEQ ID NO: 70712 - DNA, 110 bp, synthetic construct; identical to SEQ ID NO: 70711
  source 1..110: mol_type = other DNA

SEQ ID NO: 70713 - DNA, 110 bp, synthetic construct
  source 1..110: mol_type = other DNA
agcagagatgttagactcacatgacaaagtgtatatacatacctgttgagtccctggtctgtgcccttctctcgatccagacttctgggatcaatgttgagctcttctac

SEQ ID NO: 70714 - DNA, 110 bp, synthetic construct
  source 1..110: mol_type = other DNA
ggtctgtgcccttctctcgatccagacttctgggatcaatgttgagctcttctaccaatcatcttaagaatctggctttattccttacactcaaacccaatacccatttc

SEQ ID NO: 70715 - DNA, 110 bp, synthetic construct
  source 1..110: mol_type = other DNA
ccctcagtgcaaaggagacaggaaaacatagtttaggttctattcaggaagacgtagttagagctttgaagatcagttagcagtttttaccacagatgctaaaggccagc

SEQ ID NO: 70716 - DNA, 110 bp, synthetic construct
  source 1..110: mol_type = other DNA
agttagagctttgaagatcagttagcagtttttaccacagatgctaaaggccagcactcaaatcacggtggaaggaaagtggtggccagataattgcaataatatcatca

SEQ ID NO: 70717 - DNA, 110 bp, synthetic construct
  source 1..110: mol_type = other DNA
gagtacctattaatatttttgagactaactcagctatttcaaatgattttagacacaggcagtgttccaaatgacataaaattggaattcacccaataaaagagaggctg

SEQ ID NO: 70718 - DNA, 110 bp, synthetic construct
  source 1..110: mol_type = other DNA
aatattatctaatcgcatattcttaagcttccactcaagtttcaatggctgaaagaagtcttattgacacatctaactctgaagaagcaggaaaggggtgttggaccatg

SEQ ID NO: 70719 - DNA, 110 bp, synthetic construct
  source 1..110: mol_type = other DNA
tgttaaattacaaaaggaattttaagacaccattatttaaatcataggggagacatttctctttcacgtgacagtgcagctgatctaggctggtagggtgcctctcctcc

SEQ ID NO: 70720 - DNA, 110 bp, synthetic construct
  source 1..110: mol_type = other DNA
tttctctttcacgtgacagtgcagctgatctaggctggtagggtgcctctcctccactggatcattcagggtaccaagtgcctgcattttgcttaacaagcccaggagag

SEQ ID NO: 70721 - DNA, 110 bp, synthetic construct
  source 1..110: mol_type = other DNA
ttgtgttttaggttagttccccatatcaaatgagtgcataagtatttgacttcaacacagtgtatttcttaagattctgaagattttctcaaggatttaaaatggttact

SEQ ID NO: 70722 - DNA, 110 bp, synthetic construct; identical to SEQ ID NO: 70721
  source 1..110: mol_type = other DNA

SEQ ID NO: 70723 - DNA, 110 bp, synthetic construct
  source 1..110: mol_type = other DNA
tatgctctttgtgcccacagcacactcacagggtaactagcccatggagcttcatcagaaactgataggtgactggcagtgtaggcattccaatagcccttcttcaggag

SEQ ID NO: 70724 - DNA, 110 bp, synthetic construct
  source 1..110: mol_type = other DNA
tttaagccacacagacaaagcagcacgtagcaggatggctgctgatgattccaagacaaaagagccaccgtgggctgaacttcgaggcgatcaccttggcgttttggact

SEQ ID NO: 70725 - DNA, 110 bp, synthetic construct
  source 1..110: mol_type = other DNA
acaaaagagccaccgtgggctgaacttcgaggcgatcaccttggcgttttggactgaagagggcttacttatgcagagcacgacccctcaggatgaggggcttcccgggc

SEQ ID NO: 70726 - DNA, 110 bp, synthetic construct; identical to SEQ ID NO: 70724
  source 1..110: mol_type = other DNA

SEQ ID NO: 70727 - DNA, 110 bp, synthetic construct; identical to SEQ ID NO: 70725
  source 1..110: mol_type = other DNA

SEQ ID NO: 70728 - DNA, 110 bp, synthetic construct
  source 1..110: mol_type = other DNA
cccgaagtttctcacccactggctccaggggaaacggggctcctcccagaagcctctgatctaaacctggtgccgtttttctctctcatcgctccattcttttcctttgc

SEQ ID NO: 70729 - DNA, 110 bp, synthetic construct
  source 1..110: mol_type = other DNA
ctgatctaaacctggtgccgtttttctctctcatcgctccattcttttcctttgcagctaccacaaacggggatgctgtcactagctgtggctttacttgtttactattg

SEQ ID NO: 70730 - DNA, 110 bp, synthetic construct
  source 1..110: mol_type = other DNA
gactccccactgctgacatgaacaggcatgatacacattccctcagtggtgtatctgagatgattttaagcgatcaatgaataaatattttctaaattttaactgtaatg

SEQ ID NO: 70731 - DNA, 110 bp, synthetic construct
  source 1..110: mol_type = other DNA
ccgtgccgctgccacccccccaccccatccccccaactctcagaaggagccagctctcctgtggcagaagggaccagacaggagtctctgtgaaaggttcctgttcagca

SEQ ID NO: 70732 - DNA, 110 bp, synthetic construct
  source 1..110: mol_type = other DNA
ctcctgtggcagaagggaccagacaggagtctctgtgaaaggttcctgttcagcatgtccctccttcctgcggctactcttccctgcagttctgcagcagtacaagttca

SEQ ID NO: 70733 - DNA, 110 bp, synthetic construct
  source 1..110: mol_type = other DNA
atgtgcctaggggactgaacagactcttccgaggcctttaaaaccttgcatttctcagtcccacacagccatccaacgttattccccatacccccttccttcccagcatg

SEQ ID NO: 70734 - DNA, 110 bp, synthetic construct
  source 1..110: mol_type = other DNA
cagtcccacacagccatccaacgttattccccatacccccttccttcccagcatgaaccacagtgttttctctccctgttcctgcttattcctgcccctaagacttttct

SEQ ID NO: 70735 - DNA, 110 bp, synthetic construct
  source 1..110: mol_type = other DNA
gtctatatctcagccccacagttcatttggccaagagatttaggtgtgagaggataagcatttttagcttgctggactttacatgggccaaatacaggttaagtatagtt

SEQ ID NO: 70736 - DNA, 110 bp, synthetic construct
  source 1..110: mol_type = other DNA
aagcatttttagcttgctggactttacatgggccaaatacaggttaagtatagtttaacatccagggtcaggagatggcagcgcatgagggtaaatggtgatgcagggac

SEQ ID NO: 70737 - DNA, 110 bp, synthetic construct
  source 1..110: mol_type = other DNA
agctgaatcaggagcacagagattgataagttgtggtgcaattgcaattgaggccttagcagaccccatggggagctctggagcaggaatggccctgcagcgttaaggct

SEQ ID NO: 70738 - DNA, 110 bp, synthetic construct
  source 1..110: mol_type = other DNA
ttagcagaccccatggggagctctggagcaggaatggccctgcagcgttaaggctaatctaggccaaggggctagaccgctatactctcacatcagccagtcaacgtata

SEQ ID NO: 70739 - DNA, 110 bp, synthetic construct
  source 1..110: mol_type = other DNA
tctcatgaacccaagactgtacttggtcctctcgcaagaactcccgacatgtgcctaccagcatcccatcagcagatgtgctcgctggcctcccagctctggcattttga

SEQ ID NO: 70740 - DNA, 110 bp, synthetic construct
  source 1..110: mol_type = other DNA
taccagcatcccatcagcagatgtgctcgctggcctcccagctctggcattttgatgcagctctgctccaaagggctgtctgcaggctactggagctgttctgcccacat

SEQ ID NO: 70741 - DNA, 110 bp, synthetic construct; identical to SEQ ID NO: 70739
  source 1..110: mol_type = other DNA

SEQ ID NO: 70742 - DNA, 110 bp, synthetic construct; identical to SEQ ID NO: 70740
  source 1..110: mol_type = other DNA

SEQ ID NO: 70743 - DNA, 110 bp, synthetic construct
  source 1..110: mol_type = other DNA
gtgactgggcggcatcccctacctgtcgttactgctgccactttcctggcctggcagtcgctgcagccttctgatcggctgacttgttccctggcccgattttgtaaatt

SEQ ID NO: 70744 - DNA, 110 bp, synthetic construct
  source 1..110: mol_type = other DNA
agtcgctgcagccttctgatcggctgacttgttccctggcccgattttgtaaattggcaaacgtggaccttccctaccctgctgcctcccgcctgcaggagctgttggcc

SEQ ID NO: 70745 - DNA, 110 bp, synthetic construct
  source 1..110: mol_type = other DNA
aagtggaggcccggagaggtttactaacctgccctaagtcccagctgataagaggtggtgggtacggatccccacagtctgaatgccggaagtgcccagtgaaagtttgt

SEQ ID NO: 70746 - DNA, 110 bp, synthetic construct
  source 1..110: mol_type = other DNA
tgaaggctaagagggttttggagaaaggctttcttactggtttgtgctttctgcggctgttacaccacattcccctcctccatgaaaaaggaacaaatggcttgcttatc

SEQ ID NO: 70747 - DNA, 110 bp, synthetic construct
  source 1..110: mol_type = other DNA
gctgttacaccacattcccctcctccatgaaaaaggaacaaatggcttgcttatcagctgcctgagctctgacacgccagtgtcccccaccgctgacatacaggcagatg

SEQ ID NO: 70748 - DNA, 110 bp, synthetic construct; identical to SEQ ID NO: 70746
  source 1..110: mol_type = other DNA

SEQ ID NO: 70749 - DNA, 110 bp, synthetic construct; identical to SEQ ID NO: 70747
  source 1..110: mol_type = other DNA

SEQ ID NO: 70750 - DNA, 110 bp, synthetic construct
  source 1..110: mol_type = other DNA
cttaggaattttttttttccttattttcccttcttcctgtgactaggcctcctaaagatggatggtgtatcccggagagcagacttagtcctatatcattgtggcaagaa

SEQ ID NO: 70751 - DNA, 110 bp, synthetic construct
  source 1..110: mol_type = other DNA
tctctgctgcagggctacgtcaccaaagattcagtgtccaacattcaaacatcatcctgctttcataatggaatttttgtttttgttttttctttttagggccacacctt

SEQ ID NO: 70752 - DNA, 110 bp, synthetic construct
  source 1..110: mol_type = other DNA
cttcctgacagcaatatataatggaaggctataaaaacttgaaaaataatgcaacataaaaagggattgactcagctccaagaggccataaatggtaacaaataccaatg

SEQ ID NO: 70753 - DNA, 110 bp, synthetic construct
  source 1..110: mol_type = other DNA
ataaaaagggattgactcagctccaagaggccataaatggtaacaaataccaatggatgatttatttcatgctgtaatctttacagtaagtcatctttcagacatttcct

SEQ ID NO: 70754 - DNA, 110 bp, synthetic construct
  source 1..110: mol_type = other DNA
ggtcctcttcaagactggtgtggcttcttctctttatccacaatggcttacagaactagcacagcatttgtgtcagtgcatgttgacattagtttataagaattattttc

SEQ ID NO: 70755 - DNA, 110 bp, synthetic construct
  source 1..110: mol_type = other DNA
ctagcacagcatttgtgtcagtgcatgttgacattagtttataagaattattttcaggagttcccgccatggggcagcggaaacgaatcagactaggaactatgaggttg

SEQ ID NO: 70756 - DNA, 110 bp, synthetic construct; identical to SEQ ID NO: 70754
  source 1..110: mol_type = other DNA

SEQ ID NO: 70757 - DNA, 110 bp, synthetic construct; identical to SEQ ID NO: 70755
  source 1..110: mol_type = other DNA

SEQ ID NO: 70758 - DNA, 110 bp, synthetic construct
  source 1..110: mol_type = other DNA
gccacattagcaacctacacgacagccatagcaatgtgggattcgagccatgtctacaacctatgccacagctcactgcaacactggttccttaacactgagcagggcca

SEQ ID NO: 70759 - DNA, 110 bp, synthetic construct
  source 1..110: mol_type = other DNA
agccatgtctacaacctatgccacagctcactgcaacactggttccttaacactgagcagggccagatactgaacctgcattctatggatactaatcaggttcgttactg

SEQ ID NO: 70760 - DNA, 110 bp, synthetic construct
  source 1..110: mol_type = other DNA
tccttcatcaacccacaagaaaggaagctgtgtggtgctgatgactcccccctaccccacaggccatcacatccaacttacataatttgtaccaacagtcctttatcctc

SEQ ID NO: 70761 - DNA, 110 bp, synthetic construct
  source 1..110: mol_type = other DNA
acactgacctcaggtctgtttcttccctacagtttcatcccctgagattaagtaatttactaaatgaacaatctcacctacatagactcagattatcaactccttccacc

SEQ ID NO: 70762 - DNA, 110 bp, synthetic construct
  source 1..110: mol_type = other DNA
tttactaaatgaacaatctcacctacatagactcagattatcaactccttccacctatggagattttgaggattcactcctctggtgggcccccattccaccactataaa

SEQ ID NO: 70763 - DNA, 110 bp, synthetic construct
  source 1..110: mol_type = other DNA
acagtctccctgtgtgattctggagcacaccatagcttaagagtgctgtggtttgataatgagagagctgagactggaccttagctgaggcaggatacatcacctgggaa

SEQ ID NO: 70764 - DNA, 110 bp, synthetic construct
  source 1..110: mol_type = other DNA
ataatgagagagctgagactggaccttagctgaggcaggatacatcacctgggaaagacctagattaatctgtaagtgaggcttaaattacaaatatagtaatagtggct

SEQ ID NO: 70765 - DNA, 110 bp, synthetic construct
  source 1..110: mol_type = other DNA
tagagtcgaacattgggtgcttcgaggtgtacaatgcttcagcttgaccttaaattcaaagtaattggccttagaacctgttcatgagctttgcaaaaacctcattggat

SEQ ID NO: 70766 - DNA, 110 bp, synthetic construct
  source 1..110: mol_type = other DNA
tcaaagtaattggccttagaacctgttcatgagctttgcaaaaacctcattggatgccagcaggctgtgaatgtgcaaaatcttaataaacaaagaacaatgaagtaagt

SEQ ID NO: 70767 - DNA, 110 bp, synthetic construct
  source 1..110: mol_type = other DNA
aaacacagagtcctgggcacgtgtgttacctgtggtgctttcggatgctaggatgacaactttggaagcaactgcatctactgggttccccacagccagcaagaagttgg

SEQ ID NO: 70768 - DNA, 110 bp, synthetic construct
  source 1..110: mol_type = other DNA
acaactttggaagcaactgcatctactgggttccccacagccagcaagaagttggcagaatcggggagtatgtgtccctcggatgcagggctgttctggtggatgtcgct

SEQ ID NO: 70769 - DNA, 110 bp, synthetic construct
  source 1..110: mol_type = other DNA
taaaaacctcctctagaacaaaaattattttaaaaacttgtattctgtcgttgcgataggcagaattctaagatagcctcctagattcctggtataaacataatttctct

SEQ ID NO: 70770 - DNA, 110 bp, synthetic construct
  source 1..110: mol_type = other DNA
gaagaacaggacacagctaggtgctccagaaaacgcttttgaggacctcaataaagcccacccctctcctttagacagcatcacccccctctctctacttacaaagttta

SEQ ID NO: 70771 - DNA, 110 bp, synthetic construct
  source 1..110: mol_type = other DNA
gcccacccctctcctttagacagcatcacccccctctctctacttacaaagtttaggagcagtttggagattagtttctgttgcttgtggctgagttgctgacttgggtg

SEQ ID NO: 70772 - DNA, 110 bp, synthetic construct
  source 1..110: mol_type = other DNA
gcaaatctccaccttctctaacacctgagttcaaacccttaccatatcaattattcacaatttctctctttttttttttaaacggctgcacctgtggtatatgaagttct

SEQ ID NO: 70773 - DNA, 110 bp, synthetic construct
  source 1..110: mol_type = other DNA
cacaatttctctctttttttttttaaacggctgcacctgtggtatatgaagttcttggtccagggattgaatccacgctgcagctacaacctacaccacagctgtgacaa

SEQ ID NO: 70774 - DNA, 110 bp, synthetic construct
  source 1..110: mol_type = other DNA
caagaaaaacaacaaataaataggagagaagagatgctacgtacatcctcagtcatagctttatctatttaaagtctacaaactggtttcttacagtcctcggggaatat

SEQ ID NO: 70775 - DNA, 110 bp, synthetic construct
  source 1..110: mol_type = other DNA
tagctttatctatttaaagtctacaaactggtttcttacagtcctcggggaatatgaacattaaactagagcaggataatggctgctttaacatcctcctataaactcat

SEQ ID NO: 70776 - DNA, 110 bp, synthetic construct
  source 1..110: mol_type = other DNA
atgaaagaagtatagtaagactagttctagaaatgttagcaaaagtacaaactaaaaccaactgttgctgttgaaacacactattatttctgggatggaaaacaactgct

SEQ ID NO: 70777 - DNA, 110 bp, synthetic construct
  source 1..110: mol_type = other DNA
ttcatttagcacttagtcaaatccaagactaaacaaagggataacactagttctgaatatttaaagcatcaactcctcattgagggaaccagtgtcgtcggatttccttg

SEQ ID NO: 70778 - DNA, 110 bp, synthetic construct; identical to SEQ ID NO: 70777
  source 1..110: mol_type = other DNA

SEQ ID NO: 70779 - DNA, 110 bp, synthetic construct
  source 1..110: mol_type = other DNA
tcttcacctggcttcttcagagtttccagtgtccaattctgctctcatattctcacaagaaaattgttcctctggggactgatttaagtcaccactgttatctgctcttg

SEQ ID NO: 70780 - DNA, 110 bp, synthetic construct
  source 1..110: mol_type = other DNA
caagaaaattgttcctctggggactgatttaagtcaccactgttatctgctcttgctcatcacaatgggacactgtcatacctcttccttcttgagacctgcaactgtag

SEQ ID NO: 70781 - DNA, 110 bp, synthetic construct
  source 1..110: mol_type = other DNA
aaagaaaaagtggaacaaagagcttccatcacaaagcttttccactgaaggcactgagttctgctttcacattgcagtgtcccaaccaagtcctgttctaaccccagaag

SEQ ID NO: 70782 - DNA, 110 bp, synthetic construct
  source 1..110: mol_type = other DNA
gggagggtccccagcccttagcagttctctgcaaatacaaagcaacagctagaatctacaatcattgatatgtaagatttcccttaactgatcagaaacaggcatctctc

SEQ ID NO: 70783 - DNA, 110 bp, synthetic construct
  source 1..110: mol_type = other DNA
gtgacacctaattattaactcaaatactctaggtagggtttaatcacctaagatcacagtgtagtgacgtccatccttgagctagaaaccattcttctatgtaaatggtc

SEQ ID NO: 70784 - DNA, 110 bp, synthetic construct
  source 1..110: mol_type = other DNA
taatgtagaaaagccaccttggctacttgtgattggataacctgaggcatctataggatcaagttttggtttgcttacatcagctgctaaggcattggaatcatctcaat

SEQ ID NO: 70785 - DNA, 110 bp, synthetic construct
  source 1..110: mol_type = other DNA
aggcaaaatgtaaagagatctgcacagagggtgctgcttccctgagctccctagcttgagatgcatgtccacatgtgtgggccatggcttggtgctgaaatttggcttca

SEQ ID NO: 70786 - DNA, 110 bp, synthetic construct
  source 1..110: mol_type = other DNA
ctgcaaaccattaccaatgagaacccatcagggccaagcctggggacgaccccgcaagctcgctttctcctggtcatgctcagcatgctcaccctgcagcacggccccca

SEQ ID NO: 70787 - DNA, 110 bp, synthetic construct
  source 1..110: mol_type = other DNA
acttagctcttcctcctcaagtgctccttctacaggtgcatgctagctaggcgagaggaggttcctcctcccagggcaggaccagagaaggctcctgtgctttgggccca

SEQ ID NO: 70788 - DNA, 110 bp, synthetic construct
  source 1..110: mol_type = other DNA
tggagaggggcctgcctcagtctgaaggagggggagatccactttttaaaatgcctttttggtactctttggcctttttaatggtgtgcctgaatttctgtcaattacta

SEQ ID NO: 70789 - DNA, 110 bp, synthetic construct
  source 1..110: mol_type = other DNA
gaaagtggaattcaataaggggttgactagagctatggttcaggaaaacataattattcaaatcttgagacaaatatttctaggtaataatgacttctgaatgtaaagtt

SEQ ID NO: 70790 - DNA, 110 bp, synthetic construct
  source 1..110: mol_type = other DNA
gcggtggtgttttccctggacattgtgctgaccaagtatcactacataggtgccaggactcatatgtggctcatgacagccaacagtgatgtaatcatgatgctttcctg

SEQ ID NO: 70791 - DNA, 110 bp, synthetic construct
  source 1..110: mol_type = other DNA
atgtcacctgtgcttctgaccaaacagctctaaatcagaagtttccaaggcgctctcatccagtcagtaatttgctagggtggctcacagaattcaggggaacaatactc

SEQ ID NO: 70792 - DNA, 110 bp, synthetic construct
  source 1..110: mol_type = other DNA
tcttctttctttcaactagaattactccctgcctgaaattcattctttagactttccttaataggagtctactaggagtgaatcttctcagtgtttttttcttaaactgt

SEQ ID NO: 70793 - DNA, 110 bp, synthetic construct; identical to SEQ ID NO: 70792
  source 1..110: mol_type = other DNA

SEQ ID NO: 70794 - DNA, 110 bp, synthetic construct
  source 1..110: mol_type = other DNA
acatacagaaaagacaggataattgttggagttagaaggcctaggtaagcaggaggcagtgtgatctggaccatagacagaagcagggaatgggatgaaactgtaccagg

SEQ ID NO: 70795 - DNA, 110 bp, synthetic construct
  source 1..110: mol_type = other DNA
gcagtgtgatctggaccatagacagaagcagggaatgggatgaaactgtaccaggaagaagaagtgggggtgaatgaaacttcaggaaaatgtgaagtatcagagatggg

SEQ ID NO: 70796 - DNA, 110 bp, synthetic construct
  source 1..110: mol_type = other DNA
gcagacagaaaatacatactgtatgattccatttatatggaattctagaaaatgccaattattctatagtagcagaaagcagctaaatattgcctggggatggaggcagg

SEQ ID NO: 70797 - DNA, 110 bp, synthetic construct
  source 1..110: mol_type = other DNA
ttccatttcttaactactgtaaatagtgttgctatgaacatagaggtgcatgtgtcttttcaaatcatatttttgtccaaatatcgcccaggagtagggttgctggatca

SEQ ID NO: 70798 - DNA, 110 bp, synthetic construct
  source 1..110: mol_type = other DNA
ttccatattcctgatttatccctcccatctccttcccctttgataaccataagtttggttttgaaatcttttgagtatggcccttttaacaatattaattcttccaatct

SEQ ID NO: 70799 - DNA, 110 bp, synthetic construct; identical to SEQ ID NO: 70798
  source 1..110: mol_type = other DNA

SEQ ID NO: 70800 - DNA, 110 bp, synthetic construct
  source 1..110: mol_type = other DNA
ggctgagtcaccctgcagtgcccagcttccaacacactggtattgccttgtgcctttacagagctttgtacttaaacgctggcatgccactgtcccagccccctgagttg

SEQ ID NO: 70801 - DNA, 110 bp, synthetic construct
  source 1..110: mol_type = other DNA
atctaccttggtactccagcagccccatgacctgtgactatctatgcctgactgggctgcaaagggctgagccttccctggcctgggcctgccttgtcctgctggtgctg

SEQ ID NO: 70802 - DNA, 110 bp, synthetic construct
  source 1..110: mol_type = other DNA
aaatgcaactgatttctgtacgttaatttgaatcctgctaccttgctgaatgtgttcatcagttctagtagcttttgcgtagaatctttagggttttccatatgtagtat

SEQ ID NO: 70803 - DNA, 110 bp, synthetic construct; identical to SEQ ID NO: 70802
  source 1..110: mol_type = other DNA

SEQ ID NO: 70804 - DNA, 110 bp, synthetic construct
  source 1..110: mol_type = other DNA
agaagagactggtcaccttggaaggacagcctggcaaggaggacatggagtacccactcctccatcctggtccacactgctgcctctcagaccagtgcaggaagtggttc

SEQ ID NO: 70805 - DNA, 110 bp, synthetic construct
  source 1..110: mol_type = other DNA
actcctccatcctggtccacactgctgcctctcagaccagtgcaggaagtggttcagcatttggtcccaaaggagaggcgatgcagggcagcaggtagatatggaacgaa

SEQ ID NO: 70806 - DNA, 110 bp, synthetic construct
  source 1..110: mol_type = other DNA
gaagcaaatgtgtttcccctgtgtctcctggctgccctctgacaaaaaggagtaagctgtggcctgaaacttgggcacacatgtgtgcccgcatctccagtccctgtccc

SEQ ID NO: 70807 - DNA, 110 bp, synthetic construct
  source 1..110: mol_type = other DNA
gcatatttggggtgggcctggtggtgaaggccaggggctgaggcttcacatttgtgaggtcatctaacttcctcagcacctgtgaagtaggccctctgaccccctttccc

SEQ ID NO: 70808 - DNA, 110 bp, synthetic construct
  source 1..110: mol_type = other DNA
cttgcctgctgctgctgccacactcagtagagagtatagccatggctgagtgggttgtgggggtgaagtctactggaggacagagctccagtcatccctggacccccgga

SEQ ID NO: 70809 - DNA, 110 bp, synthetic construct
  source 1..110: mol_type = other DNA
ttgggcaaaggagaaaaaaaaaaaaaaaccttcattgatttgccagggaaaggagactgcagcaggctaatgccctaaaaactgtgccctccttgggagaaatgtggaga

SEQ ID NO: 70810 - DNA, 110 bp, synthetic construct
  source 1..110: mol_type = other DNA
gggaaaggagactgcagcaggctaatgccctaaaaactgtgccctccttgggagaaatgtggagatggtcttatagttttggaaatggaaaattgggccagagataagga

SEQ ID NO: 70811 - DNA, 110 bp, synthetic construct
  source 1..110: mol_type = other DNA
tagcactgacctgtgggggtagaacagatacctgaaccatggattagcaccaccaagcccattgcactgtcattgcttattgcgaatttgactggtcattttgatgagga

SEQ ID NO: 70812 - DNA, 110 bp, synthetic construct
  source 1..110: mol_type = other DNA
agcccattgcactgtcattgcttattgcgaatttgactggtcattttgatgaggactccttgactcctggggtgaatcctctcatttctggacctggcattagcagggaa

SEQ ID NO: 70813 - DNA, 110 bp, synthetic construct
  source 1..110: mol_type = other DNA
tccattccccttcttctcctttgggaccacagttaccatatgaaagacttttacaccatgtcctctggtctcttatgcttgtgtctgtgtttctcatcttctgtgcctca

SEQ ID NO: 70814 - DNA, 110 bp, synthetic construct
  source 1..110: mol_type = other DNA
gccccaaatcacattactggcaagtggtggagaaatgtcatttttttccctcaagtctatctgacttccaaatccatccttttccctatactggtgaccctcaaactttc

SEQ ID NO: 70815 - DNA, 110 bp, synthetic construct
  source 1..110: mol_type = other DNA
tctatctgacttccaaatccatccttttccctatactggtgaccctcaaactttccaagggagtactcttttgtatgtttttattccctgcaaattgtattccctgcaaa

SEQ ID NO: 70816 - DNA, 110 bp, synthetic construct
  source 1..110: mol_type = other DNA
atgggacttcagggttgggcaaggtgatcctcatatctcagtgagatgtgacagtctcagccaatccaggtgggagctcaagtgcaaagattgcctgaaaaggaggtcct

SEQ ID NO: 70817 - DNA, 110 bp, synthetic construct
  source 1..110: mol_type = other DNA
ctcagccaatccaggtgggagctcaagtgcaaagattgcctgaaaaggaggtcctgtggagtagcagactttggtacctcagccatgtttagtcactggctggagccacc

SEQ ID NO: 70818 - DNA, 110 bp, synthetic construct
  source 1..110: mol_type = other DNA
tagcactcctttatctctgggctataaaaacagacacaactatgcacccagagttggctctccctaattatcaggaggctacctgctgtgttaacagtgtttcttgcctt

SEQ ID NO: 70819 - DNA, 110 bp, synthetic construct
  source 1..110: mol_type = other DNA
acaactatgcacccagagttggctctccctaattatcaggaggctacctgctgtgttaacagtgtttcttgccttgataaactttttctacaccttgctttgaatctgga

SEQ ID NO: 70820 - DNA, 110 bp, synthetic construct
  source 1..110: mol_type = other DNA
cttaggcagcaagatcactagctgagggagtgaggtgacactgtcaaacatcacggatgtcacactgtctccaaagtctatctgatgaggcattctcctgtcctggcagt

SEQ ID NO: 70821 - DNA, 110 bp, synthetic construct
  source 1..110: mol_type = other DNA
acacgatgcaattacatgttacacacacatgttgtagcagggccaggcactgcgtggatcggggtaccatgtctcccccatcagagcacagttaatttattttttcctcc

SEQ ID NO: 70822 - DNA, 110 bp, synthetic construct
  source 1..110: mol_type = other DNA
gaaggttgcaatgcaataaaggaaacatgttcagtttaaactgggtagatcttatgatcagcttcaactccaaacccgatgcgatatactttaaaccaaggagatttaac

SEQ ID NO: 70823 - DNA, 110 bp, synthetic construct
  source 1..110: mol_type = other DNA
gatcagcttcaactccaaacccgatgcgatatactttaaaccaaggagatttaacactgaagcaggagtgatgtcagcgtcatggctgagtgagatgtccctcataatgt

SEQ ID NO: 70824 - DNA, 110 bp, synthetic construct
  source 1..110: mol_type = other DNA
atgttgacagtggctgtttctgagacggggccagcaaacttctacctgtcttttcccaaatgatatgtccagtaacacggggaaccaaatcaccattttgtgaaatccta

SEQ ID NO: 70825 - DNA, 110 bp, synthetic construct
  source 1..110: mol_type = other DNA
ccaggggaagttcaggttctcctgacaggggtggaatcacatgatctggccctgggtctcctgctggagcagtgcaatttgttcctcctgggattgtcattccacattga

SEQ ID NO: 70826 - DNA, 110 bp, synthetic construct
  source 1..110: mol_type = other DNA
gtctcctgctggagcagtgcaatttgttcctcctgggattgtcattccacattgagatctgggtctcctactgaagtgggtgcaggcgctctaagcaggggtggtgaatt

SEQ ID NO: 70827 - DNA, 110 bp, synthetic construct
  source 1..110: mol_type = other DNA
ggcatttttattcttgccatctctttcacatagtgtatgccaaataaacctgaaaacggtgaaatttccatgttgcatgttgcccgtctctctagagaatgtcatttctc

SEQ ID NO: 70828 - DNA, 110 bp, synthetic construct
  source 1..110: mol_type = other DNA
acggtgaaatttccatgttgcatgttgcccgtctctctagagaatgtcatttctcgtgtctacaaatgtcctctgcatttcaaaggacacttgattacagagaagaagga

SEQ ID NO: 70829 - DNA, 110 bp, synthetic construct
  source 1..110: mol_type = other DNA
aaatttaaaagaattcttctactcaagctttgattaaaaataggatttggttaaatagcattttgtaactgtgataccaatgcgagtgagattgtcctacaaacacacac

SEQ ID NO: 70830 - DNA, 110 bp, synthetic construct
  source 1..110: mol_type = other DNA
agctttgattaaaaataggatttggttaaatagcattttgtaactgtgataccaatgcgagtgagattgtcctacaaacacacacatacatctttgaattttgtgttaaa

SEQ ID NO: 70831 - DNA, 110 bp, synthetic construct
  source 1..110: mol_type = other DNA
taacatttttaaagtacatagtatgattcaagctgaattttaggtgtttcacatgttattacttttctgaccacaacaagagccctataaaataactggcctggcaggct

SEQ ID NO: 70832 - DNA, 110 bp, synthetic construct
  source 1..110: mol_type = other DNA
catgatgcctcagttgcagaaatgagactggcctctgtgaccctgggcctctgattcaggtaattcattagtttggaagctaagtcaaactggtttaaataatagaaaga

SEQ ID NO: 70833 - DNA, 110 bp, synthetic construct
  source 1..110: mol_type = other DNA
gctaaatttgaagtggaagtattaagtatgaaatcaagagcatcctgatacatgttatatgtatatatgtagtgtgtacctacgtgtgttacatatgtggtgtgtgtatt

SEQ ID NO: 70834 - DNA, 110 bp, synthetic construct
  source 1..110: mol_type = other DNA
gaagtattaagtatgaaatcaagagcatcctgatacatgttatatgtatatatgtagtgtgtacctacgtgtgttacatatgtggtgtgtgtatttatatatgtgtatgt

SEQ ID NO: 70835 - DNA, 110 bp, synthetic construct
  source 1..110: mol_type = other DNA
agaacttggtttagatagaatatgcattatgattcagcttctctggccttcttacctttcccataaattggaaatgattacatttactccattaatcacacatttttttt

SEQ ID NO: 70836 - DNA, 110 bp, synthetic construct
  source 1..110: mol_type = other DNA
tccatgatttaatcccttcatgatttaatccaggggcagatggcaagtgccaaactccaggtcacaatattccaggataagccgtagggggatgtgtcagtaaccatatt

SEQ ID NO: 70837 - DNA, 110 bp, synthetic construct
  source 1..110: mol_type = other DNA
tccaggtcacaatattccaggataagccgtagggggatgtgtcagtaaccatatttcttttctcattctttgaaccctccttccctactgactcctcagcccatcaccag

SEQ ID NO: 70838 - DNA, 110 bp, synthetic construct
  source 1..110: mol_type = other DNA
aggatgtataaatggatgttttgtgcttggtttaaattgttagcaagccttattttagctgtataatcagtgggcaaaaaagccctctctggaattgtgtgcttgggttc

SEQ ID NO: 70839 - DNA, 110 bp, synthetic construct
  source 1..110: mol_type = other DNA
tagctgtataatcagtgggcaaaaaagccctctctggaattgtgtgcttgggttcccttaaaagtgagccacctcatacagatctcatacacctcataatctggatctga

SEQ ID NO: 70840 - DNA, 110 bp, synthetic construct; identical to SEQ ID NO: 70838
  source 1..110: mol_type = other DNA

SEQ ID NO: 70841 - DNA, 110 bp, synthetic construct; identical to SEQ ID NO: 70839
  source 1..110: mol_type = other DNA

SEQ ID NO: 70842 - DNA, 110 bp, synthetic construct
  source 1..110: mol_type = other DNA
aatgatccggagttcggtcagccttggctaactagcatgttcacttttataaaaagtattttaatgttgttttacagaataatggagaacaggtacaatgatttgttaca

SEQ ID NO: 70843 - DNA, 110 bp, synthetic construct
  source 1..110: mol_type = other DNA
ggtcagccttggctaactagcatgttcacttttataaaaagtattttaatgttgttttacagaataatggagaacaggtacaatgatttgttacatgtattagttttcct

SEQ ID NO: 70844 - DNA, 110 bp, synthetic construct
  source 1..110: mol_type = other DNA
attccattaagggggaagtggcaatggtctggaggggcactggaggccaaaagtagtatggagtctaaaatctgccatgattagctttcagaccacaccaattcacatct

SEQ ID NO: 70845 - DNA, 110 bp, synthetic construct
  source 1..110: mol_type = other DNA
gccagggtttccgcagactccctttggctccggtggctgtggagcagtgatggcctaaagataacccaagtctctaagaagggtcacttctaaatagcagctttaatacc

SEQ ID NO: 70846 - DNA, 110 bp, synthetic construct
  source 1..110: mol_type = other DNA
gagcaggactacctgagacacatagggtccagaattttagaaggcgttcacccttgggtccatgtcaagttggccctttgaccacattgagaatgattgcttctaagctt

SEQ ID NO: 70847 - DNA, 110 bp, synthetic construct
  source 1..110: mol_type = other DNA
gggtccatgtcaagttggccctttgaccacattgagaatgattgcttctaagctttgcaccttaggcagcttggtttgcttacctccagggcatggtccatcccaggcag

SEQ ID NO: 70848 - DNA, 110 bp, synthetic construct
  source 1..110: mol_type = other DNA
aaatgctgtccagaccaaacaaaacctgacagcccatggctctggggtgttcataagtgtgtgtatgtaattttttgttcccctagtttttagagctcaacgtcttttaa

SEQ ID NO: 70849 - DNA, 110 bp, synthetic construct
  source 1..110: mol_type = other DNA
gataactggggggaaaagtgcacaatttatattcattcaatcatgcaacatattccttgttgttatagagctcacattctagttggaaaatctgtcagactcactatgcc

SEQ ID NO: 70850 - DNA, 110 bp, synthetic construct
  source 1..110: mol_type = other DNA
caaagagaaagcacatgtttgcagcacctgttagagaacttgaagggtgcaggcactcccctgggggtctgggtacgtggtaggctgtgatggacattcctttatacttg

SEQ ID NO: 70851 - DNA, 110 bp, synthetic construct
  source 1..110: mol_type = other DNA
ctcccctgggggtctgggtacgtggtaggctgtgatggacattcctttatacttgactcttggttgtggttgggatgcctgccttttctgctgaggtctgttttgtggaa

SEQ ID NO: 70852 - DNA, 110 bp, synthetic construct
  source 1..110: mol_type = other DNA
acctgcttctcagacataggttatcaccttaatgctgacttctcccaaatcttttcccaagtttcatctcttgagctctaattgcatctcatgtttccctatgcccacca

SEQ ID NO: 70853 - DNA, 110 bp, synthetic construct
  source 1..110: mol_type = other DNA
cccaagtttcatctcttgagctctaattgcatctcatgtttccctatgcccaccactgcatgtcctgatgcacccaaatcgataaggctaaaattcagactcaccaattt

SEQ ID NO: 70854 - DNA, 110 bp, synthetic construct
  source 1..110: mol_type = other DNA
gaaagtctcctgaagataatgctattgtgcttgtatatgcagaaggaaagtgtggaaattgccagaattaccatcagtgtcagtgctaccgcaagaggtataatgctgtg

SEQ ID NO: 70855 - DNA, 110 bp, synthetic construct
  source 1..110: mol_type = other DNA
tggtagtttttgatttaggtctgagtcatggggaagatggtcattgtttccaggttctccggcttggtttagccagtggtcctggggccacctgctttgaattcatttcc

SEQ ID NO: 70856 - DNA, 110 bp, synthetic construct
  source 1..110: mol_type = other DNA
tctccggcttggtttagccagtggtcctggggccacctgctttgaattcatttccttttctctaatttggaaagacttacaggagttccatcagaccactcccaagagcc

SEQ ID NO: 70857 - DNA, 110 bp, synthetic construct
  source 1..110: mol_type = other DNA
ttcagaatccttcctccgcaggcactattttatcatatttgtttcttaattttgcctttgggacaagataaagatttgtataagtatcatcactttgcattctaggtccg

SEQ ID NO: 70858 - DNA, 110 bp, synthetic construct
  source 1..110: mol_type = other DNA
ctttgggacaagataaagatttgtataagtatcatcactttgcattctaggtccgcaaggtgatggcaaacttcagttaccttgctgccaatttctaggtctttcctggc

SEQ ID NO: 70859 - DNA, 110 bp, synthetic construct
  source 1..110: mol_type = other DNA
ggatgtactgagaggtgaggctggtgatgtagttgggaatcagtttattaaacacttgatggcttttgagaagtgaaattacctggaccagtctgtttaagcatgacagg

SEQ ID NO: 70860 - DNA, 110 bp, synthetic construct
  source 1..110: mol_type = other DNA
ttgatggcttttgagaagtgaaattacctggaccagtctgtttaagcatgacaggccctggtggactctttagacataaatgaaatttgaatgatttgaaaaggaaactt

SEQ ID NO: 70861 - DNA, 110 bp, synthetic construct
  source 1..110: mol_type = other DNA
cactgcctgtgtccaaagcaaaagtcctggcctccttttctcttcttccaagggtgccagaaaaatgtaaacaatatttaagttgaatttctgagtcctctgaattttct

SEQ ID NO: 70862 - DNA, 110 bp, synthetic construct
  source 1..110: mol_type = other DNA
ttccaagggtgccagaaaaatgtaaacaatatttaagttgaatttctgagtcctctgaattttctgtcagcctttagaacaatattcattagttgtttataccaacattt

SEQ ID NO: 70863 - DNA, 110 bp, synthetic construct
  source 1..110: mol_type = other DNA
ctggaatccatcttggccaaaagctgtgcatgcgtatcggggagggccctggagcaggtcgggtgtgagggaaaaaaacaagatacttggccaaaagaaaaagacctggg

SEQ ID NO: 70864 - DNA, 110 bp, synthetic construct
  source 1..110: mol_type = other DNA
ttgcatgtttcccaggcattcaaaacccgtttcaagataaattaatttctactttcatattttaaaaagagtgcattatttcccttctggcacattaccttgtgctatta

SEQ ID NO: 70865 - DNA, 110 bp, synthetic construct; identical to SEQ ID NO: 70864
  source 1..110: mol_type = other DNA

SEQ ID NO: 70866 - DNA, 110 bp, synthetic construct
  source 1..110: mol_type = other DNA
gaagaaacacaggagaggccaggaccttggaatctccaaggaaaaccatgaaactgacagatggcttagggtgcctctttgagtattgtttatatcttcttttgtactgc

SEQ ID NO: 70867 - DNA, 110 bp, synthetic construct
  source 1..110: mol_type = other DNA
ccaaggaaaaccatgaaactgacagatggcttagggtgcctctttgagtattgtttatatcttcttttgtactgcatttagtaccttcttaataattttatatttttcat

SEQ ID NO: 70868 - DNA, 110 bp, synthetic construct; identical to SEQ ID NO: 70866
  source 1..110: mol_type = other DNA

SEQ ID NO: 70869 - DNA, 110 bp, synthetic construct; identical to SEQ ID NO: 70867
  source 1..110: mol_type = other DNA

SEQ ID NO: 70870 - DNA, 110 bp, synthetic construct
  source 1..110: mol_type = other DNA
ctattttccttttacataaatttcaagtggtagatgaacattttaaattataacatgggggtactagcggatgaatctaggttatgcagcattattaaaatccttggttg

SEQ ID NO: 70871 - DNA, 110 bp, synthetic construct; identical to SEQ ID NO: 70870
  source 1..110: mol_type = other DNA

SEQ ID NO: 70872 - DNA, 110 bp, synthetic construct; identical to SEQ ID NO: 70870
  source 1..110: mol_type = other DNA

SEQ ID NO: 70873 - DNA, 110 bp, synthetic construct; identical to SEQ ID NO: 70870
  source 1..110: mol_type = other DNA

SEQ ID NO: 70874 - DNA, 110 bp, synthetic construct
  source 1..110: mol_type = other DNA
aatacaacaaatttattcaacaaatatgtattatcatgtgccaggcaggattaggcacttgggatgtaacagtaaacaaaccaaaattcccttttctcaaagagtttaca

SEQ ID NO: 70875 - DNA, 110 bp, synthetic construct
  source 1..110: mol_type = other DNA
gcccattgcttttagcatagaacttcaatgttatatttacaagatcctctgaatcagaacaacatcacaggcattttcaagaatttttttcagacaattcaaggcagata

SEQ ID NO: 70876 - DNA, 110 bp, synthetic construct
  source 1..110: mol_type = other DNA
cccctgcactggtgaggcccaccaggggctcagctctgcttattactcattagcactggacctggggtaagatacttaacttctccaagcctcactttcctatcccaggt

SEQ ID NO: 70877 - DNA, 110 bp, synthetic construct
  source 1..110: mol_type = other DNA
ctggacctggggtaagatacttaacttctccaagcctcactttcctatcccaggtttccaccaatcttgccagatccttacaaggattaacgagactgttgtaatcagta

SEQ ID NO: 70878 - DNA, 110 bp, synthetic construct
  source 1..110: mol_type = other DNA
tagatgactatccaaggttatataatatgtgcttaattaagctggtaaacccatttggagaattccaaagttcacggtttgtctaatatacctttgcaaaaatttgcacg

SEQ ID NO: 70879 - DNA, 110 bp, synthetic construct
  source 1..110: mol_type = other DNA
tggattttgcttttgtcttcccatgactttcacctttcgattcatgttttttttttttttttccttttagtcaaatactgttttctctcttcaagacatgaatgccccat

SEQ ID NO: 70880 - DNA, 110 bp, synthetic construct
  source 1..110: mol_type = other DNA
tttttttccttttagtcaaatactgttttctctcttcaagacatgaatgccccatttactatgcccctagcccaaacatcctttagtattaatgagaatttaaatttgga

SEQ ID NO: 70881 - DNA, 110 bp, synthetic construct
  source 1..110: mol_type = other DNA
agtcaagatctttcccagtttctcccgtatgattggacatacaacaatctttcctgttatttagatcatcgagtggtttaatttcatctaaaatcttttgttttctgacg

SEQ ID NO: 70882 - DNA, 110 bp, synthetic construct
  source 1..110: mol_type = other DNA
atgtcttgacagaatgaagaataaagggcaaagaaccctgagctagaaataaaattggtgaatgcaagaaataagacggccagcacgtgttacagcacagtgagtgagga

SEQ ID NO: 70883 - DNA, 110 bp, synthetic construct
  source 1..110: mol_type = other DNA
tgtaattttctctgtctgaaaatgtgaagattttttgctaaaatttgaaaccattgaaaatagcaaaggccatgcacaaaaactgtctttttactgctggacttctgtgc

SEQ ID NO: 70884 - DNA, 110 bp, synthetic construct; identical to SEQ ID NO: 70883
  source 1..110: mol_type = other DNA

SEQ ID NO: 70885 - DNA, 110 bp, synthetic construct
  source 1..110: mol_type = other DNA
gagatcatcacgtctcctgcaacacttcgtcgtcaaattaagattgagactcgtggtagggactctccacctacaatcacaatacctataggcgtaaatcacactgatag

SEQ ID NO: 70886 - DNA, 110 bp, synthetic construct
  source 1..110: mol_type = other DNA
gtcagggaagcttttcatgatgtgttgttggcaaagaaagcttaaatagcatagaaaaagtactgaccatgtaagaaaaaaatgaaaaataaagaagtaaactaagttat

SEQ ID NO: 70887 - DNA, 110 bp, synthetic construct
  source 1..110: mol_type = other DNA
gggtgttgctgaagtgttagaggttagagcaggaacttcatgaggtagcagaaagcatcaaggctaagggaaggttaacggtggacagctatgtggaaggctatgatcca

SEQ ID NO: 70888 - DNA, 110 bp, synthetic construct
  source 1..110: mol_type = other DNA
caaaaatccagaattttgtgtgagatctcctaatataaggctagcaatcaatgtttaaaaatgtaagcacatggtgtgtcacgtaaaagctcctcacaggccatgtgtgc

SEQ ID NO: 70889 - DNA, 110 bp, synthetic construct
  source 1..110: mol_type = other DNA
taaaaatgtaagcacatggtgtgtcacgtaaaagctcctcacaggccatgtgtgcctccctgaacgactgctcagtcagcttcaaaggtgtacccttccttatctgaggg

SEQ ID NO: 70890 - DNA, 110 bp, synthetic construct
  source 1..110: mol_type = other DNA
ggcagagacagtaaaacttcttagctgtctttgaggcaagacaacagtacgtactaacacagagaagccaagccctgtaagtgcctgtatgtgattcagttgcaatgcga

SEQ ID NO: 70891 - DNA, 110 bp, synthetic construct
  source 1..110: mol_type = other DNA
ttgaagacccctctgaggacactggcttttgctctggatgatgtgggaagttgtccctaggtgttgagcagctgctgtaatccgatttagatgcagtaaaagcagcttgg

SEQ ID NO: 70892 - DNA, 110 bp, synthetic construct
  source 1..110: mol_type = other DNA
cctaggtgttgagcagctgctgtaatccgatttagatgcagtaaaagcagcttggaggttgtgtgagatccagaggggagatgatgatggctttgaaatataagaatcta

SEQ ID NO: 70893 - DNA, 110 bp, synthetic construct
  source 1..110: mol_type = other DNA
gtgcagccctaaaaagaaaaaaagaaaaagaaaatcaagggtctaccaagaccagctgaatcggaaactctgagaatgggcctggcgtgctgaagcttgagaactaaatt

SEQ ID NO: 70894 - DNA, 110 bp, synthetic construct
  source 1..110: mol_type = other DNA
ctgaatcggaaactctgagaatgggcctggcgtgctgaagcttgagaactaaattatagattcttggaagtcactgttgacaaaatgtggatcatatttcaaaatcatgc

SEQ ID NO: 70895 - DNA, 110 bp, synthetic construct
  source 1..110: mol_type = other DNA
catctgcaacatatgccacagcttacattaacttgcaacaatgcctaattcttaacccactaatagaggttacggatcaaaccttcatcctcatggatactagttgggtt

SEQ ID NO: 70896 - DNA, 110 bp, synthetic construct; identical to SEQ ID NO: 70895
  source 1..110: mol_type = other DNA

SEQ ID NO: 70897 - DNA, 110 bp, synthetic construct
  source 1..110: mol_type = other DNA
acaaaattagaccacccaccctatgcccggccacccagaatcaagacactgaaactgactgtttaagccaatttcttagcttctgcgggtttcaggttctatctaacaaa

SEQ ID NO: 70898 - DNA, 110 bp, synthetic construct
  source 1..110: mol_type = other DNA
accatatccttaacccactgtgcccactagggatccaacctacatccctttgtctccaaagccaccaatgatcccatgatcccgttaggccaaagctattccacaaaggg

SEQ ID NO: 70899 - DNA, 110 bp, synthetic construct
  source 1..110: mol_type = other DNA
ccaaagccaccaatgatcccatgatcccgttaggccaaagctattccacaaagggaactccagtaatgtttattaaatacaaatgtttttttctgtatttttatacttcc

SEQ ID NO: 70900 - DNA, 110 bp, synthetic construct
  source 1..110: mol_type = other DNA
ttacttgggttatctcatgaggttcctattagctgttggctgcaactgcagtcatctgaagactcagctgaggtggagatttaagatggcttattgacaaggctggcagt

SEQ ID NO: 70901 - DNA, 110 bp, synthetic construct
  source 1..110: mol_type = other DNA
actcagctgagatgaggactcagccgctcattgcaaaaggctagtaccacagaacttccaagggtatcgtgctcagggcccctggttccattgacacaaaaacatatctg

SEQ ID NO: 70902 - DNA, 110 bp, synthetic construct
  source 1..110: mol_type = other DNA
ttctgagcagatgggaggctgccactgtggaggaggctaaaacgcagttcatgcgctctgcaaaccaaatagctttgtgtgtgcaggatctggggtttattgctgcagta

SEQ ID NO: 70903 - DNA, 110 bp, synthetic construct
  source 1..110: mol_type = other DNA
ctctgcaaaccaaatagctttgtgtgtgcaggatctggggtttattgctgcagtaaaatgataaaaatagggtgcttgcacttgtttgctacagttgttttcatttataa

SEQ ID NO: 70904 - DNA, 110 bp, synthetic construct
  source 1..110: mol_type = other DNA
cccatcagggtgagccattgcccgccgtagagagtgtggtctcatgagctgaggcgtttgatgctataattgcccagtgtccattctgtcagaaggataggacagagaag

SEQ ID NO: 70905 - DNA, 110 bp, synthetic construct
  source 1..110: mol_type = other DNA
actatacagaagtatgccatgaggagctgacatactttctgccagctcttagacgtaggtatgtgcgcactcactttagaatgcaaggaaatgaacaaatatacaaaatg

SEQ ID NO: 70906 - DNA, 110 bp, synthetic construct
  source 1..110: mol_type = other DNA
taagaaaccactttttactcttttatgtctgttttcttctcagcagctagagtgatttttagaaacattaacggattatacattaaccctctttatgtcctcctgttgca

SEQ ID NO: 70907 - DNA, 110 bp, synthetic construct
  source 1..110: mol_type = other DNA
ccttttatcaggcttccctagtccgggacaccatccctcgccccattactccaggccaggtgccaggcaactggggacacccctataagctgagcctgcccactttattt

SEQ ID NO: 70908 - DNA, 110 bp, synthetic construct
  source 1..110: mol_type = other DNA
gtttcctggggggttcttttataatcttaagagaagagagggcattggaaaattacttagatgggattcccttgattttaaggaatggtaaagcaagatttaattccggc

SEQ ID NO: 70909 - DNA, 110 bp, synthetic construct
  source 1..110: mol_type = other DNA
cttagatgggattcccttgattttaaggaatggtaaagcaagatttaattccggctagaataatacagaacacttctggcactgtgaacaatctattcctggtgtgtgtc

SEQ ID NO: 70910 - DNA, 110 bp, synthetic construct
  source 1..110: mol_type = other DNA
ctatttaggcatttgctgttttctttggcaaatctgacatctgaggacattttcctctactctccccctagcatgtcctgcttcagctgcactggcatccttgctgttcc

SEQ ID NO: 70911 - DNA, 110 bp, synthetic construct
  source 1..110: mol_type = other DNA
tctactctccccctagcatgtcctgcttcagctgcactggcatccttgctgttcctggaacataccagggaggctcccacccagggccttcagatgtgacctttcctctg

SEQ ID NO: 70912 - DNA, 110 bp, synthetic construct; identical to SEQ ID NO: 70910
  source 1..110: mol_type = other DNA

SEQ ID NO: 70913 - DNA, 110 bp, synthetic construct; identical to SEQ ID NO: 70911
  source 1..110: mol_type = other DNA

SEQ ID NO: 70914 - DNA, 110 bp, synthetic construct
  source 1..110: mol_type = other DNA
tgcaaaaaccacaccattaccatgcctaactactggtatgattttctttaataacagccactaacccagtccatattcaagtatccccagctgaatggctatagatgatt

SEQ ID NO: 70915 - DNA, 110 bp, synthetic construct
  source 1..110: mol_type = other DNA
agccactaacccagtccatattcaagtatccccagctgaatggctatagatgattgctcaatctggactttggtcaagggccatgccattgcctggttttatgtattaaa

SEQ ID NO: 70916 - DNA, 110 bp, synthetic construct
  source 1..110: mol_type = other DNA
gttgaacctttgccgaacaatcttgaacgctgctgatctttatcttttctgtggtctattagctaagtctcagatgttggagctctagattttccttggtggaaattagc

SEQ ID NO: 70917 - DNA, 110 bp, synthetic construct
  source 1..110: mol_type = other DNA
ctattagctaagtctcagatgttggagctctagattttccttggtggaaattagccaagtagcaagcaccactgttggggcctaataattcagctttcggaactctttgt

SEQ ID NO: 70918 - DNA, 110 bp, synthetic construct
  source 1..110: mol_type = other DNA
gcacccgttcagcctcatctcatacttcatcttctctgcactcagtccaagctgttaaaaccagccttctttcttttccttcctgccccagggcctttgcactggctgtt

SEQ ID NO: 70919 - DNA, 110 bp, synthetic construct
  source 1..110: mol_type = other DNA
tgtttttcactattcatcccaagggaagcacttcctaggacccagctctgcacctgtgtcaatgccttttccctattgattagaaattagtggagttcctgctctggctc

SEQ ID NO: 70920 - DNA, 110 bp, synthetic construct
  source 1..110: mol_type = other DNA
gggatcctgggacatcgcaaaggctgagaaccctctggagcaggtaatcccctcacaccctcacaaaacctgccgccaagttgataccattttcctcctggcttgaaatg

SEQ ID NO: 70921 - DNA, 110 bp, synthetic construct
  source 1..110: mol_type = other DNA
agctaactttcagtgagccccctaggtcacatcaggccatgctgcctccttaatgcattacctcatttggttgctacaatatccttggaggcaagtactatgtttgacct

SEQ ID NO: 70922 - DNA, 110 bp, synthetic construct
  source 1..110: mol_type = other DNA
cattacctcatttggttgctacaatatccttggaggcaagtactatgtttgacctcagctaagaaataaagaaattgaggctcagaggggcagcatgcccagcagagcct

SEQ ID NO: 70923 - DNA, 110 bp, synthetic construct
  source 1..110: mol_type = other DNA
tgtgagaaccagaccatgaaaggcatgtgctgctgactggagcagctaaacctcactccttccaaaacaggcagctgctagcggtccttgcattcaccctcttccaacct

SEQ ID NO: 70924 - DNA, 110 bp, synthetic construct
  source 1..110: mol_type = other DNA
ctccttccaaaacaggcagctgctagcggtccttgcattcaccctcttccaacctgattttgtactaggtcctgtgctttctacatacacactaatatcctgtattaaag

SEQ ID NO: 70925 - DNA, 110 bp, synthetic construct
  source 1..110: mol_type = other DNA
tcttttcactatataggactcttggaacaaaaagccatacacaggaactgggtcagtcagctcaattcaaaagtaagggctgtcattttccaacctactaattcttcttc

SEQ ID NO: 70926 - DNA, 110 bp, synthetic construct
  source 1..110: mol_type = other DNA
caaagctactgtaggaaccactgatgatcactagctctagtccatcctatacactgttctcgtattaccctctcttaagcacagctctagactttcaatggctggctgtc

SEQ ID NO: 70927 - DNA, 110 bp, synthetic construct
  source 1..110: mol_type = other DNA
atctttccttcttccccaggaagaaaaaaacccactgtgcagctttaggaatttaggaacattttcacaggtaaaggtgtagttgaaaaggaacacctaggagttccctg

SEQ ID NO: 70928 - DNA, 110 bp, synthetic construct
  source 1..110: mol_type = other DNA
ttgggaccagaagtgcaagttttgcacaatctgaaatttgcttactattctaacatgctgcagaattgaacttgagtctgcattctgagcacagcttctagtacacacag

SEQ ID NO: 70929 - DNA, 110 bp, synthetic construct
  source 1..110: mol_type = other DNA
tgctgcagaattgaacttgagtctgcattctgagcacagcttctagtacacacaggtttagtacacacaggtacatgcaagtttgctgttgcgtggttatgggggagata

SEQ ID NO: 70930 - DNA, 110 bp, synthetic construct
  source 1..110: mol_type = other DNA
ataagcccatttgtatcattcttttaaattccacatataagtggtatcatacagtatttgtctcactctgtctggcctacttcacctttaaaaaattgagaaaaatttga

SEQ ID NO: 70931 - DNA, 110 bp, synthetic construct; identical to SEQ ID NO: 70930
  source 1..110: mol_type = other DNA

SEQ ID NO: 70932 - DNA, 110 bp, synthetic construct
  source 1..110: mol_type = other DNA
gcaccacctcttctaacagtgagcttccatgggtgcaaggctgggtatctgtaaccctgcacctagcacatgcaccagctcaccacactgaagagttaaattacagccca

SEQ ID NO: 70933 - DNA, 110 bp, synthetic construct
  source 1..110: mol_type = other DNA
attagagcaccaggtgagctgatgaaaggacagcactccaactgccttccaaacgactccgggttcacttgagctttgtttacatgtaagggaagacaggggctggcaag

SEQ ID NO: 70934 - DNA, 110 bp, synthetic construct
  source 1..110: mol_type = other DNA
aagatcctggcaacctgacaactctagctgctccatcatctgaagctccgactgccatggcagcacctagtttcaggccgatgctgaggccagttactgccaccaggttt

SEQ ID NO: 70935 - DNA, 110 bp, synthetic construct
  source 1..110: mol_type = other DNA
ctatgaatcaatgtaatatataaaatgtgatttaggggctgcattgcctgaggtcacttctgatttcactgcttttgagctgtgtagcactgttccttgcactcaaatct

SEQ ID NO: 70936 - DNA, 110 bp, synthetic construct
  source 1..110: mol_type = other DNA
ggaatggagctggcagggtcaggagtggttttcaggcccctcaagcttaatgaggatttttgtcccaatcctcgatctgaaacaggagaactgcctttgtgaacattcca

SEQ ID NO: 70937 - DNA, 110 bp, synthetic construct
  source 1..110: mol_type = other DNA
cagtaaagacttctctgatgatctctgagaatccctagccctggcatgcctttctcaggcacaaatacagctgttgctccagaacatggacccaaataccatcatttttt

SEQ ID NO: 70938 - DNA, 110 bp, synthetic construct
  source 1..110: mol_type = other DNA
ctgctgagattttaccttgtatgactgctgcctggtcttagctgggagacagctccctccctcctcagctcaacctccccttggacattcagaattctaataggaaggac

SEQ ID NO: 70939 - DNA, 110 bp, synthetic construct
  source 1..110: mol_type = other DNA
agtctctgcctctgtttcatgttttaaaataaggggattatttaaaatgggctttgggtgtaattttacgtttactgttgtatgggaagtaaggcccaaaaccttacata

SEQ ID NO: 70940 - DNA, 110 bp, synthetic construct
  source 1..110: mol_type = other DNA
atatgaaaaataaaagtaggggttttgtgacgattgattgagcttattacaggtaaggcgcagaaaacagacctagcacatggttaaatgtacatgaaatgtttgttgtt

SEQ ID NO: 70941 - DNA, 110 bp, synthetic construct
  source 1..110: mol_type = other DNA
ttttccagggcttagaataacacttggtacatagaagatcctcaataaagactttttgaatgaatgaatgagcttattcccaatacctgcctcacagagttgttgtaagt

SEQ ID NO: 70942 - DNA, 110 bp, synthetic construct
  source 1..110: mol_type = other DNA
ttgaatgaatgaatgagcttattcccaatacctgcctcacagagttgttgtaagtttaaagaacctaatacagagcctgacaaatactaagtgcttagtaaacatcagcc

SEQ ID NO: 70943 - DNA, 110 bp, synthetic construct
  source 1..110: mol_type = other DNA
ttgcagctgtcctcaccgtatttgttccttgccaccacagtgtattcggcatcatcctccatagttacactgtggattgttaattggtaaagacccttgtctgactcgaa

SEQ ID NO: 70944 - DNA, 110 bp, synthetic construct
  source 1..110: mol_type = other DNA
cctccatagttacactgtggattgttaattggtaaagacccttgtctgactcgaatgtgtacttcctatcatcatcacctggtttgattttctgacctgatttataccat

SEQ ID NO: 70945 - DNA, 110 bp, synthetic construct
  source 1..110: mol_type = other DNA
ctggtatggggaagtggcagagttaggatggcaggcagggggctgagggtataaggagtggaatggaattgaaaaaccatgagctggtgaggaaagagggaaagcctgag

SEQ ID NO: 70946 - DNA, 110 bp, synthetic construct
  source 1..110: mol_type = other DNA
ggagatttctggaatagaggatgatctgtacccaaagccaaattccactatccaggtgtttgatgtatagcacttgggtctctctgatctttctccagccttggtaaggt

SEQ ID NO: 70947 - DNA, 110 bp, synthetic construct
  source 1..110: mol_type = other DNA
gtgtttgatgtatagcacttgggtctctctgatctttctccagccttggtaaggtattaggaaggccacagagttcttttaatgttctctaactttctatcattttccat

SEQ ID NO: 70948 - DNA, 110 bp, synthetic construct; identical to SEQ ID NO: 70946
  source 1..110: mol_type = other DNA

SEQ ID NO: 70949 - DNA, 110 bp, synthetic construct; identical to SEQ ID NO: 70947
  source 1..110: mol_type = other DNA

SEQ ID NO: 70950 - DNA, 110 bp, synthetic construct
  source 1..110: mol_type = other DNA
ccattcctttaaatatgatagtgtgacctgtactgaggtactggaggttctcacttgacacagctgaagtcctctgaggccctgatgtttgatatggacactcaagagta

SEQ ID NO: 70951 - DNA, 110 bp, synthetic construct
  source 1..110: mol_type = other DNA
tcagttgaaattcttcctttacttgtccatggttataccacgacatataactttaatttccttcagcctactattcatttaacttggtagtgagctgacgcttgtcctga

SEQ ID NO: 70952 - DNA, 110 bp, synthetic construct
  source 1..110: mol_type = other DNA
atttccttcagcctactattcatttaacttggtagtgagctgacgcttgtcctgatatgtgttaacttccagaacataggtatgaacataaagcagttctaaatcagttc

SEQ ID NO: 70953 - DNA, 110 bp, synthetic construct
  source 1..110: mol_type = other DNA
gccttccaggaataatgcattttgcctgtctttcaaaaagacagacattgttgtagctatgccataccaccagcagaattcccttgagtaatgatgccatccttgactaa

SEQ ID NO: 70954 - DNA, 110 bp, synthetic construct
  source 1..110: mol_type = other DNA
gctatgccataccaccagcagaattcccttgagtaatgatgccatccttgactaactgggagcttgtcaactcctctgagcactgggatttggcctgatgactgcctcct

SEQ ID NO: 70955 - DNA, 110 bp, synthetic construct
  source 1..110: mol_type = other DNA
ttcttttccgccaccccactttccttggattataaaaatgtggcccgcctaatccttgggacagagcttctttgcctgcctgattgtacccctcacaggagtcttatctt

SEQ ID NO: 70956 - DNA, 110 bp, synthetic construct
  source 1..110: mol_type = other DNA
aaatgtggcccgcctaatccttgggacagagcttctttgcctgcctgattgtacccctcacaggagtcttatcttaatatatttatttcttgcctatcactttgcctctc

SEQ ID NO: 70957 - DNA, 110 bp, synthetic construct
  source 1..110: mol_type = other DNA
gtttctgatctgaataaccaggcagatggtgtgctgttctggggaaaggaagattgagtggaagaataattgagctgtgggttggaattcagtgttaagtttgttacgtg

SEQ ID NO: 70958 - DNA, 110 bp, synthetic construct
  source 1..110: mol_type = other DNA
gagtggaagaataattgagctgtgggttggaattcagtgttaagtttgttacgtgcacagtgctcatttagacatccaaatagagacatcaggtagcagtgaaacatatg

SEQ ID NO: 70959 - DNA, 110 bp, synthetic construct
  source 1..110: mol_type = other DNA
caaatgaaattatatcattgacagtagaagctaggcagaggaggagattaaaagaaaagaaatttatctaccgagaaaaaattcacagaagaggaaatgagcatgaacag

SEQ ID NO: 70960 - DNA, 110 bp, synthetic construct
  source 1..110: mol_type = other DNA
aaagaaatttatctaccgagaaaaaattcacagaagaggaaatgagcatgaacagattaatttcatgcccttcttaaacactctgctctaggaagctgattttcaaattt

SEQ ID NO: 70961 - DNA, 110 bp, synthetic construct; identical to SEQ ID NO: 70959
  source 1..110: mol_type = other DNA

SEQ ID NO: 70962 - DNA, 110 bp, synthetic construct; identical to SEQ ID NO: 70960
  source 1..110: mol_type = other DNA

SEQ ID NO: 70963 - DNA, 110 bp, synthetic construct
  source 1..110: mol_type = other DNA
accttgccatacccctctcatttgaagtccatttctaagagaggtttcagagcaagaggaggaatgcatttcagtgtgaaacgtagccacctcattcctagcctttggcc

SEQ ID NO: 70964 - DNA, 110 bp, synthetic construct
  source 1..110: mol_type = other DNA
gaggaggaatgcatttcagtgtgaaacgtagccacctcattcctagcctttggcctgagaggagtgccagcatttaactgattctaagtgcctggcagaccagggcagca

SEQ ID NO: 70965 - DNA, 110 bp, synthetic construct
  source 1..110: mol_type = other DNA
tgtctttataaggagaggattagtgccgttctaggtgtcctgaaatcctgagagagcttacttctctatgccatatgacaatgtaaggcaagacactatctgagaaacag

SEQ ID NO: 70966 - DNA, 110 bp, synthetic construct
  source 1..110: mol_type = other DNA
gcttacttctctatgccatatgacaatgtaaggcaagacactatctgagaaacaggaaatggggcctatccagacactgagtttgccagcctgatgttgattcccagtct

SEQ ID NO: 70967 - DNA, 110 bp, synthetic construct
  source 1..110: mol_type = other DNA
tgtcttgatgactgatccccaagtggttttaaacttctgtatacagatgtttctggacattgttatggttaatttgctgtcattgtttatgacataggagtgacagtatt

SEQ ID NO: 70968 - DNA, 110 bp, synthetic construct
  source 1..110: mol_type = other DNA
gacattgttatggttaatttgctgtcattgtttatgacataggagtgacagtattgccctaagaagtgtatctgtcccacctactccctcatccataaatggagtaattt

SEQ ID NO: 70969 - DNA, 110 bp, synthetic construct
  source 1..110: mol_type = other DNA
aaacaataaggcaggtttttggaaaaggacggagaaggtagctggaaacattaaagaaacttcatccaaaaaataatgtcctctcaaaaactttcctattttaatttcat

SEQ ID NO: 70970 - DNA, 110 bp, synthetic construct; identical to SEQ ID NO: 70969
  source 1..110: mol_type = other DNA

SEQ ID NO: 70971 - DNA, 110 bp, synthetic construct
  source 1..110: mol_type = other DNA
ctaagtattctcatctctgttctcaacgtgtctcctccaatgttttactctggtgtggctctctctactctgatactctgtcttatgaactctatccatcttggttcctc

SEQ ID NO: 70972 - DNA, 110 bp, synthetic construct
  source 1..110: mol_type = other DNA
tggctctctctactctgatactctgtcttatgaactctatccatcttggttcctctatttcatcacctcaactcaagagttctctgggttccatctgagttaccccctct

SEQ ID NO: 70973 - DNA, 110 bp, synthetic construct
  source 1..110: mol_type = other DNA
ttcaaactatattagaaagctaaattaaatctgtatgaattggtgtaaaaaatacaaacacataggccaatggaacacaaaccaaaaccccaaatcatcaccacacatca

SEQ ID NO: 70974 - DNA, 110 bp, synthetic construct
  source 1..110: mol_type = other DNA
ctggaaatgtatatagggcattatcttagttttatttaaacattagctcttgggagcatctgctgtggcataatgggttaatgatccgacttgtcttggtggaggtactg

SEQ ID NO: 70975 - DNA, 110 bp, synthetic construct
  source 1..110: mol_type = other DNA
acagccagatatggagcctagtcagggaaatgtccaacacctggtgcagctcagcagggccagttctcagcatgccaagccccagcagctgctggagtagggtcctgaca

SEQ ID NO: 70976 - DNA, 110 bp, synthetic construct
  source 1..110: mol_type = other DNA
gagctgctcctgtatttggcgtagtacaagcttagccattctacctaaggctaaattgctagacaatagagtgtctatcttatataattcctttcaagcctaatactttg

SEQ ID NO: 70977 - DNA, 110 bp, synthetic construct
  source 1..110: mol_type = other DNA
ttgctagacaatagagtgtctatcttatataattcctttcaagcctaatactttgcacaatgcattgataggacattttaaaaattgctagttaagagcctgtaacaagg

SEQ ID NO: 70978 - DNA, 110 bp, synthetic construct; identical to SEQ ID NO: 70976
  source 1..110: mol_type = other DNA

SEQ ID NO: 70979 - DNA, 110 bp, synthetic construct; identical to SEQ ID NO: 70977
  source 1..110: mol_type = other DNA

SEQ ID NO: 70980 - DNA, 110 bp, synthetic construct
  source 1..110: mol_type = other DNA
attctaacacactgtgctgtgccgggatcaaacctgcatctctgctctcccaagactctgccgattcctttgtacaggagcccctatcagctatatttttaaatttctct

SEQ ID NO: 70981 - DNA, 110 bp, synthetic construct
  source 1..110: mol_type = other DNA
ctctgccgattcctttgtacaggagcccctatcagctatatttttaaatttctctagagatcatttttcatcctatttctttctagaatttaaatacatatatacacgaa

SEQ ID NO: 70982 - DNA, 110 bp, synthetic construct
  source 1..110: mol_type = other DNA
tggtctttgtatggggtgtgttttgattctcagattggttctgggcaggacacttcatctgggtggggaacaggtgaaatagaggagaggtgaggagtctacacaccttt

SEQ ID NO: 70983 - DNA, 110 bp, synthetic construct
  source 1..110: mol_type = other DNA
ctccctgatatcaatttttgcacattgagctttgggggaagaagaatctaagaggtatattaacgtgtagatatttattaagaatcttgtcaggaagggggaaaaagcag

SEQ ID NO: 70984 - DNA, 110 bp, synthetic construct
  source 1..110: mol_type = other DNA
aatgaaatataggactccctaggttatccttaattccccaaagactgtgtctatagttgtttccaccaagctattcttaaaggtaacgagaattgcattgtggagttatc

SEQ ID NO: 70985 - DNA, 110 bp, synthetic construct
  source 1..110: mol_type = other DNA
aagcacacagcttgaatgtgcctgagcccaaactgaacccatgatttcattacccaatcccagtgttcttttcattacattagtctatcaaacacaatatattatcataa

SEQ ID NO: 70986 - DNA, 110 bp, synthetic construct
  source 1..110: mol_type = other DNA
gcccaaactgaacccatgatttcattacccaatcccagtgttcttttcattacattagtctatcaaacacaatatattatcataaagaatttgaatggctctttaagact

SEQ ID NO: 70987 - DNA, 110 bp, synthetic construct
  source 1..110: mol_type = other DNA
caaaacaaactggcccaatttcgacgccaaattcttggtctgtactgccaacatccacaggggcaagatctatgatgggcaagcgtgccacattctgtgttctatattca

SEQ ID NO: 70988 - DNA, 110 bp, synthetic construct
  source 1..110: mol_type = other DNA
cacaggggcaagatctatgatgggcaagcgtgccacattctgtgttctatattcaaagatggtcttgcccacgtttccatttcgtttctggaattcaatggtgcagtgag

SEQ ID NO: 70989 - DNA, 110 bp, synthetic construct
  source 1..110: mol_type = other DNA
atgtgtgcagaccacctggaagggttggtgttgaagataagaagaccacatcccctttgcaaactgtttcagtctatcatccacaagcttataagtaagtaaaacaaaat

SEQ ID NO: 70990 - DNA, 110 bp, synthetic construct
  source 1..110: mol_type = other DNA
tcttctactgaaatgggcagcctaggaaaggagagcccctcccagtggaagctattcaggacatgcatgttgaggacacagtgcgcagagaaggtattacccctaaggag

SEQ ID NO: 70991 - DNA, 110 bp, synthetic construct
  source 1..110: mol_type = other DNA
tccacagccacagcaacttgggatccaagccacatctgctacctatactacagcttatggcaagcaggcacagcagcttggggttcaagccacatctgctgcttacatca

SEQ ID NO: 70992 - DNA, 110 bp, synthetic construct
  source 1..110: mol_type = other DNA
tgcctgggaccatttaatttgtatgccaagctgtcaggcttgtgctctgaatgtccggcaagtcaggagcaaagtgtgagctcgcgttagagcggtgggaggctgagtct

SEQ ID NO: 70993 - DNA, 110 bp, synthetic construct
  source 1..110: mol_type = other DNA
aaggcccatccttaaacatgtgtctcttgattggtctgcattgtttttcttgcataaaccaaatccatgggtatataatctctagctctggggaattcctgtctgtggct

SEQ ID NO: 70994 - DNA, 110 bp, synthetic construct
  source 1..110: mol_type = other DNA
gccagatccaccttctcccaattcttgtacaaagaatacagatgtttgtttgttttcatgtttgtggtggcaccttacttgtcctgtccaagcttcctctcctgggtctc

SEQ ID NO: 70995 - DNA, 110 bp, synthetic construct
  source 1..110: mol_type = other DNA
tcatgtttgtggtggcaccttacttgtcctgtccaagcttcctctcctgggtctcaagggaacagaggtgagttagagttgggtgctagatagatggaatatgtatgtta

SEQ ID NO: 70996 - DNA, 110 bp, synthetic construct; identical to SEQ ID NO: 70994
  source 1..110: mol_type = other DNA

SEQ ID NO: 70997 - DNA, 110 bp, synthetic construct; identical to SEQ ID NO: 70995
  source 1..110: mol_type = other DNA

SEQ ID NO: 70998 - DNA, 110 bp, synthetic construct
  source 1..110: mol_type = other DNA
aagcgtgttgtttgccttagtctagatcacatgctccattcctggaacatggggtaaaattgacttccctggaaagatgtggattcccctgggggtcttggaaagcatgc

SEQ ID NO: 70999 - DNA, 110 bp, synthetic construct
  source 1..110: mol_type = other DNA
ttactctgtgccaatgggaggtcaatttgggatcttgagcagaagactaatatgagcattttaaaggaatcactctagctgccatgctgggagtaacttgtaaaggggca

SEQ ID NO: 71000 - DNA, 110 bp, synthetic construct
  source 1..110: mol_type = other DNA
ctagggagaagcctaggattctgtattcttaagcattcagcctggcaccagacttacttcctgggaatcactgcttgatcagctcattgattgagtgagagagggtttgt

SEQ ID NO: 71001 - DNA, 110 bp, synthetic construct
  source 1..110: mol_type = other DNA
gagaagaaccgcttcctgtggagcatttatctccttactttagctacaattgtcccaccaactaggtgtgagtattcttaaacccatgtgtccagcaacatagctgacat

SEQ ID NO: 71002 - DNA, 110 bp, synthetic construct
  source 1..110: mol_type = other DNA
tttgcatttctctaatagctaatgatgttggccatcacttcatataatgatttgccatgtgtctgtcttcgtctatgaaatgtttattcatgtcttttgtcaattttcta

SEQ ID NO: 71003 - DNA, 110 bp, synthetic construct; identical to SEQ ID NO: 71002
  source 1..110: mol_type = other DNA

SEQ ID NO: 71004 - DNA, 110 bp, synthetic construct
  source 1..110: mol_type = other DNA
gacttggatgtgacttgaacattgtgattttcgcaatcttctcaggcgattctaatgtgcagccaaagctggaaacatctggagtacagataggagttacctggttatag

SEQ ID NO: 71005 - DNA, 110 bp, synthetic construct
  source 1..110: mol_type = other DNA
tgtgcagccaaagctggaaacatctggagtacagataggagttacctggttatagcaagagaagtataaatattgataaaaagtgaaatttgggggagttcctgtcgtgg

SEQ ID NO: 71006 - DNA, 110 bp, synthetic construct
  source 1..110: mol_type = other DNA
gtgacccagttacacatacatgtagatgtttttttctcacattatcatgctttgtcataagtgaccagatgtaggtcccagtactacacagcaggctctcattgcctatc

SEQ ID NO: 71007 - DNA, 110 bp, synthetic construct; identical to SEQ ID NO: 71006
  source 1..110: mol_type = other DNA

SEQ ID NO: 71008 - DNA, 110 bp, synthetic construct
  source 1..110: mol_type = other DNA
tcttgttaaccaaataaaggtctgtttgaaatggtctcaaactatataattcaacgagatcactgtgtgaactgagatgccatatgatttttatgtctcagtcaatatat

SEQ ID NO: 71009 - DNA, 110 bp, synthetic construct
  source 1..110: mol_type = other DNA
gagatcactgtgtgaactgagatgccatatgatttttatgtctcagtcaatatatgatagcacatatatgtgaaatctaataaaaatggtaaaacagaaacaaactcaca

SEQ ID NO: 71010 - DNA, 110 bp, synthetic construct; identical to SEQ ID NO: 71008
  source 1..110: mol_type = other DNA

SEQ ID NO: 71011 - DNA, 110 bp, synthetic construct; identical to SEQ ID NO: 71009
  source 1..110: mol_type = other DNA

SEQ ID NO: 71012 - DNA, 110 bp, synthetic construct
  source 1..110: mol_type = other DNA
gtagtccttttgtgaagaggaagaaaatgagagaagtatacgcacttaaatccaaagtaccttgaggccaccatcttgtcccctggtgagtattttgtctacatgatgaa

SEQ ID NO: 71013 - DNA, 110 bp, synthetic construct
  source 1..110: mol_type = other DNA
agtaccttgaggccaccatcttgtcccctggtgagtattttgtctacatgatgaacaaaagttaaaagttcctacattgtaggccttatcttgtggcacagtggcttaag

SEQ ID NO: 71014 - DNA, 110 bp, synthetic construct
  source 1..110: mol_type = other DNA
aaaggatgtacaaaaaaaaccctatcaaaaaccatatgcatagtcaaagactgactgctttttcagaaaattgagttaaagacaacaatgttcatccactatacttgcta

SEQ ID NO: 71015 - DNA, 110 bp, synthetic construct
  source 1..110: mol_type = other DNA
gccagtagtacctaagctgacttaaccattcaaagtcagagtcatcactaactttctttttaacaagtgttgtgaggacatctctagcatggacatccagcaccacaagg

SEQ ID NO: 71016 - DNA, 110 bp, synthetic construct
  source 1..110: mol_type = other DNA
ctttttaacaagtgttgtgaggacatctctagcatggacatccagcaccacaagggctcccagagtaacacgattctgcttggacaatttgccacgaaccaaagtgacaa

SEQ ID NO: 71017 - DNA, 110 bp, synthetic construct
  source 1..110: mol_type = other DNA
cagctaagttggtcagagcaaactgctgattttatcaagagtttggagcaagcatggagttcaaggattagaagatgttcaggagattgagtgggttgacatcatgggca

SEQ ID NO: 71018 - DNA, 110 bp, synthetic construct
  source 1..110: mol_type = other DNA
ggagttcaaggattagaagatgttcaggagattgagtgggttgacatcatgggcagaagtgtagttacttgagtgagactatctttgattaacattcagaggcaagttta

SEQ ID NO: 71019 - DNA, 110 bp, synthetic construct
  source 1..110: mol_type = other DNA
ttgggtcacatggttagattacaactcaggttaagccttcataacctttaccagccagcagctgtttgccactttcctaaggggaaataaaggccattcagaagacagtg

SEQ ID NO: 71020 - DNA, 110 bp, synthetic construct
  source 1..110: mol_type = other DNA
cagcagctgtttgccactttcctaaggggaaataaaggccattcagaagacagtgcaaaccttcttggtgtatatgactaaaccaaagtcctgtttgctcatcctcatct

SEQ ID NO: 71021 - DNA, 110 bp, synthetic construct
  source 1..110: mol_type = other DNA
aacctcagctgcccattatgaactagatgttatccgacccaccaactcataaggctgggcatgcataagagcaatccactgccaagtggaagtggtatgtaagagacagc

SEQ ID NO: 71022 - DNA, 110 bp, synthetic construct
  source 1..110: mol_type = other DNA
cacatgagaactctcaaaggggggtagattatttagtctgtagattgatgtgaccgcttgtcccttccttctgcttactcgtctcgaaatagtttactttttagaaatat

SEQ ID NO: 71023 - DNA, 110 bp, synthetic construct
  source 1..110: mol_type = other DNA
gcttgtcccttccttctgcttactcgtctcgaaatagtttactttttagaaatatttttaacagaggaaaatttcatagtctcaaggatgagtgtggttggtggtaagga

SEQ ID NO: 71024 - DNA, 110 bp, synthetic construct
  source 1..110: mol_type = other DNA
tagcagtagggatatggacttattttggcacaagttcaatagtagactcaagagtattgaacatagcactctgaagcaaaaactgagcaaatattaaccaactgattatt

SEQ ID NO: 71025 - DNA, 110 bp, synthetic construct
  source 1..110: mol_type = other DNA
attgaacatagcactctgaagcaaaaactgagcaaatattaaccaactgattattccctcatatcatgcattgtgattctataaaggagaataaccacattcttttattc

SEQ ID NO: 71026 - DNA, 110 bp, synthetic construct
  source 1..110: mol_type = other DNA
ctagctttgtgattaatgtgtataccttattatattatgtctaccctttaaagttgatggaatgataatggaacttctacttattcttcaagtctccacacaaaactttt

SEQ ID NO: 71027 - DNA, 110 bp, synthetic construct
  source 1..110: mol_type = other DNA
attggccatagcctctaattccccaccactaagccatggggcattaataaccaacctcatggcagtggcagcaattctggaagcaagctaaactaatagtcttggatcca

SEQ ID NO: 71028 - DNA, 110 bp, synthetic construct
  source 1..110: mol_type = other DNA
ctcatggcagtggcagcaattctggaagcaagctaaactaatagtcttggatccaaagttcctgtgaaatgcccatcacaaaagagcccacatgctttggaaactatgca

SEQ ID NO: 71029 - DNA, 110 bp, synthetic construct; identical to SEQ ID NO: 71027
  source 1..110: mol_type = other DNA

SEQ ID NO: 71030 - DNA, 110 bp, synthetic construct; identical to SEQ ID NO: 71028
  source 1..110: mol_type = other DNA

SEQ ID NO: 71031 - DNA, 110 bp, synthetic construct
  source 1..110: mol_type = other DNA
aaggatgaatccatgaactgcagctgctgaattccaagtaccaggtttagagaaacctacccatattcacagtcctacacctctattttcatgaagtctatcactcttaa

SEQ ID NO: 71032 - DNA, 110 bp, synthetic construct
  source 1..110: mol_type = other DNA
cctacccatattcacagtcctacacctctattttcatgaagtctatcactcttaatttattttatgatatctccagtaataatgctggaatttctatcttgtaaaagaaa

SEQ ID NO: 71033 - DNA, 110 bp, synthetic construct; identical to SEQ ID NO: 71031
  source 1..110: mol_type = other DNA

SEQ ID NO: 71034 - DNA, 110 bp, synthetic construct; identical to SEQ ID NO: 71032
  source 1..110: mol_type = other DNA

SEQ ID NO: 71035 - DNA, 110 bp, synthetic construct
  source 1..110: mol_type = other DNA
tattaaatatacactaagagtgaaatagagaagaagaaacaccaacatgagatatattatcaagctagtcactgctatgagcaactggggcccgatcctgctggaatgag

SEQ ID NO: 71036 - DNA, 110 bp, synthetic construct
  source 1..110: mol_type = other DNA
gttaggcaaccaacaccctatctaactctacaatcatttcatcaccccaaaagaaaacccaggccccatgaagtagtcattgcccatcccaccttgtctccaggccccat

SEQ ID NO: 71037 - DNA, 110 bp, synthetic construct
  source 1..110: mol_type = other DNA
attcattgcacaaattctatacccagtcttctcagcacctctgtgaggaagctactattattttatgttttggccgcactcacggcatatggaagttcctgggccaggga

SEQ ID NO: 71038 - DNA, 110 bp, synthetic construct
  source 1..110: mol_type = other DNA
ccccacccccaaaagctgccagaacccacattttcagactttaaacctcaccacgcttcgcctttgccacatccccgctttcacaaagaaatccgacttcgtttagctta

SEQ ID NO: 71039 - DNA, 110 bp, synthetic construct
  source 1..110: mol_type = other DNA
ggccttggtcctgccctgccctcctctgccactgattttgatggaagacatttctttcagccctatacatctgcttgtgtgtataattggagtgaaatagctattcttaa

SEQ ID NO: 71040 - DNA, 110 bp, synthetic construct
  source 1..110: mol_type = other DNA
ttcagccctatacatctgcttgtgtgtataattggagtgaaatagctattcttaaaaaggttaggttattatcagtagaagaatgttctcagtatatcaatcaggactct

SEQ ID NO: 71041 - DNA, 110 bp, synthetic construct
  source 1..110: mol_type = other DNA
ttctttcatggaacagcttatatattataccattagtttagccagttatataattttctcccacagtgctcatacaggcaccttttcccccaagtatggtgatagactta

SEQ ID NO: 71042 - DNA, 110 bp, synthetic construct; identical to SEQ ID NO: 71041
  source 1..110: mol_type = other DNA

SEQ ID NO: 71043 - DNA, 110 bp, synthetic construct
  source 1..110: mol_type = other DNA
gtcgagctcaatcttaagctagctgtcaaatcatctttatctggcagtgctactttgcatcaactacatgtaaaggaatgaatgtggaaaattctctaacaccataaata

SEQ ID NO: 71044 - DNA, 110 bp, synthetic construct
  source 1..110: mol_type = other DNA
aagctagctgtcaaatcatctttatctggcagtgctactttgcatcaactacatgtaaaggaatgaatgtggaaaattctctaacaccataaataaaaataaactcaaaa

SEQ ID NO: 71045 - DNA, 110 bp, synthetic construct
  source 1..110: mol_type = other DNA
agctcaagggctgagaaggcccaggcgcctgagttcagggcttaggtactgaccggccaaggctaggggccttggggaaccatgaactcagctttctcttctttctaaat

SEQ ID NO: 71046 - DNA, 110 bp, synthetic construct
  source 1..110: mol_type = other DNA
attaacaaattttatttgtctgcctttatcaattgctgccattgaatttgcaacaacgacaaggcctttcccagctcagccttgagagccctacctgtagccaaaacttc

SEQ ID NO: 71047 - DNA, 110 bp, synthetic construct
  source 1..110: mol_type = other DNA
ccagatgcccacagaaactgtgagctagaataaagatttatcaatttaagtcattagatttgggggtagtctgagacaatatacttggtgtcatttcctgatggtctgca

SEQ ID NO: 71048 - DNA, 110 bp, synthetic construct
  source 1..110: mol_type = other DNA
aaaaagatccaaggtttgtctccttgttactattttagcgatcagaaatttgtttttctttagatctgggagcttttttggggaaggttctgaatggagccgttgggttc

SEQ ID NO: 71049 - DNA, 110 bp, synthetic construct
  source 1..110: mol_type = other DNA
ttctttagatctgggagcttttttggggaaggttctgaatggagccgttgggttccacaggagtcagtcataaagagtaactcaaaagagaaattcacattgtagaagtg

SEQ ID NO: 71050 - DNA, 110 bp, synthetic construct
  source 1..110: mol_type = other DNA
ttgagggttgggggtaattgtttgagagatggctaattgtagacaacttctttttatttatttatttttttagggccgtacctgtagcatatggaagttcccaagctagg

SEQ ID NO: 71051 - DNA, 110 bp, synthetic construct
  source 1..110: mol_type = other DNA
aattgtttgagagatggctaattgtagacaacttctttttatttatttatttttttagggccgtacctgtagcatatggaagttcccaagctaggagtcaaatgggaact

SEQ ID NO: 71052 - DNA, 110 bp, synthetic construct
  source 1..110: mol_type = other DNA
gtggcatagcagtgacaacgtcggatccttaacctcctctgccacaagggaacttctgtgatcttttgtctaaagtaaccttctcctttccactgacactttaggtggga

SEQ ID NO: 71053 - DNA, 110 bp, synthetic construct
  source 1..110: mol_type = other DNA
ctgtgatcttttgtctaaagtaaccttctcctttccactgacactttaggtgggaggtgaatatcaagtttatctgcttcatttgtttccagttagcctgtataaaggtt

SEQ ID NO: 71054 - DNA, 110 bp, synthetic construct
  source 1..110: mol_type = other DNA
cgaaatatggcatctcagacttcacagtggtcctggaacttcaaaacccttaacgcctttacagtccttgtaaaaccatgtatagcagctgtctgccttccagggtcagc

SEQ ID NO: 71055 - DNA, 110 bp, synthetic construct
  source 1..110: mol_type = other DNA
agtaaattaatagataattatctacagatgtgaaaagtgctgtacaagatttaagtacagaatgttaggaaggcagagaagggtggatggccaaggttaggttacctcct

SEQ ID NO: 71056 - DNA, 110 bp, synthetic construct
  source 1..110: mol_type = other DNA
tacagaatgttaggaaggcagagaagggtggatggccaaggttaggttacctcctattggtagcaaggtccgaatagagataccaggtggtctgattctttgactaatgc

SEQ ID NO: 71057 - DNA, 110 bp, synthetic construct
  source 1..110: mol_type = other DNA
ccacacttcccatgggctgctcccagctgaaggctgagtgtgccagggttattcaggcaaatcctcggagatgtttctaaaatgggcagacacaggagacaaaggcttgg

SEQ ID NO: 71058 - DNA, 110 bp, synthetic construct
  source 1..110: mol_type = other DNA
ggcaaatcctcggagatgtttctaaaatgggcagacacaggagacaaaggcttggctgggagttgactaggaaaagtatcccaggaagaagaagtggaggtctgggaatg

SEQ ID NO: 71059 - DNA, 110 bp, synthetic construct
  source 1..110: mol_type = other DNA
tcataagctctgaaaccagactgcccaggttcaagtctatctctactgctcattagctagaggagtcaacttacttaaatttcctgggccacagtttcctcatctgtaaa

SEQ ID NO: 71060 - DNA, 110 bp, synthetic construct
  source 1..110: mol_type = other DNA
gctagaggagtcaacttacttaaatttcctgggccacagtttcctcatctgtaaaatgggaataactctctttcttccttcataaggtcattgtgaggagcggctaatta

SEQ ID NO: 71061 - DNA, 110 bp, synthetic construct
  source 1..110: mol_type = other DNA
gaagaaaaggtagtcttttcaacaaatgatgctggaacaactggacgtccacatgtaaaatgttttaaaagaatttaggcacagacctttcacttgtcacaaaaatgtat

SEQ ID NO: 71062 - DNA, 110 bp, synthetic construct
  source 1..110: mol_type = other DNA
aacaactggacgtccacatgtaaaatgttttaaaagaatttaggcacagacctttcacttgtcacaaaaatgtattcaaaatggatcacagacctaaacataaaacacaa

SEQ ID NO: 71063 - DNA, 110 bp, synthetic construct
  source 1..110: mol_type = other DNA
taaattctgttccttcccatagattatactgtgaatgaaacacaaaggccctcccatgttgttcagtaattttttgccaactatattctgtgttgccaactatcttctgt

SEQ ID NO: 71064 - DNA, 110 bp, synthetic construct
  source 1..110: mol_type = other DNA
atgttgttcagtaattttttgccaactatattctgtgttgccaactatcttctgtgttgccaacattacagtgttgatacatagtagatgcttgatgaaaatttgttcca

SEQ ID NO: 71065 - DNA, 110 bp, synthetic construct; identical to SEQ ID NO: 71063
  source 1..110: mol_type = other DNA

SEQ ID NO: 71066 - DNA, 110 bp, synthetic construct; identical to SEQ ID NO: 71064
  source 1..110: mol_type = other DNA

SEQ ID NO: 71067 - DNA, 110 bp, synthetic construct
  source 1..110: mol_type = other DNA
ccaccttggaggacaaaggctgcttagtggctcagctagacccatctcaatgaaaggacatcacttcccaaaaatgaacccccacttagaaaacatttctccttatccaa

SEQ ID NO: 71068 - DNA, 110 bp, synthetic construct
  source 1..110: mol_type = other DNA
attacatctaacttgcttagaacagtgcctggcaagtaacaaacattcagtcaatgttaattattgtggtacacagaataaacggccttcctaaagatgtccatgtccca

SEQ ID NO: 71069 - DNA, 110 bp, synthetic construct
  source 1..110: mol_type = other DNA
gttaattattgtggtacacagaataaacggccttcctaaagatgtccatgtcccaaccttcagtacctgggaataagtcatattgcatggcaaaggagaattaagtttgc

SEQ ID NO: 71070 - DNA, 110 bp, synthetic construct
  source 1..110: mol_type = other DNA
tcagctaacttcattctccaggaggggtctcctggctcatatctttcacaggtaacatgagagtgcacagaactttgggcccctctaatcagtctgacctcaggcgccac

SEQ ID NO: 71071 - DNA, 110 bp, synthetic construct
  source 1..110: mol_type = other DNA
agtatctgtctgtctgcaaatctgtgttaagaagggttctgaagtcatgcttgaatagtggtgtctgcctgggctccaaaacaatcctcagtagtgtgtgtgtgtgtgtg

SEQ ID NO: 71072 - DNA, 110 bp, synthetic construct
  source 1..110: mol_type = other DNA
tagtggtgtctgcctgggctccaaaacaatcctcagtagtgtgtgtgtgtgtgtgtgtgtgtgtgtgtgtgtgtgtgtgtgtgtgtgtgtgtgtgtatctgtggcgggta

SEQ ID NO: 71073 - DNA, 110 bp, synthetic construct
  source 1..110: mol_type = other DNA
ttcatccattgcactttgatgtctttgggcgaaagacagtatataaggactaaggtgttattcattactctttgttattaatcatttgaactgttattgacccaaagcat

SEQ ID NO: 71074 - DNA, 110 bp, synthetic construct
  source 1..110: mol_type = other DNA
tgttattcattactctttgttattaatcatttgaactgttattgacccaaagcatcaacaaggtatattcgccctcggggtgcgggcactcagaatgtgttctgggcact

SEQ ID NO: 71075 - DNA, 110 bp, synthetic construct
  source 1..110: mol_type = other DNA
atgagctgaagaatggatgatgtgttatcaggcacaaaacaacattaatcttattgcaatctccatcagagcttttgttttttgggtgatcaagtgttattatcaattag

SEQ ID NO: 71076 - DNA, 110 bp, synthetic construct; identical to SEQ ID NO: 71075
  source 1..110: mol_type = other DNA

SEQ ID NO: 71077 - DNA, 110 bp, synthetic construct
  source 1..110: mol_type = other DNA
acatgctggtgttctctctatgcatttcaactcctgagtattttcttggtctagagttttaactctaccagattattagcttctctatttttctctgaatgtcgtccatt

SEQ ID NO: 71078 - DNA, 110 bp, synthetic construct
  source 1..110: mol_type = other DNA
aaaaaaatgaaaaaaagaacacatgcttctaggaatgtattttaaacttgaaacggttagctttcttgctccccttactattgaaccatagtttagccacattatggcct

SEQ ID NO: 71079 - DNA, 110 bp, synthetic construct
  source 1..110: mol_type = other DNA
tagagaacaaggaatcattaattctcattaggaaagtcatggagtgttttagggatacaatggaatttaagctggactttgaagaattctgatttatatctacccaataa

SEQ ID NO: 71080 - DNA, 110 bp, synthetic construct
  source 1..110: mol_type = other DNA
tacaatggaatttaagctggactttgaagaattctgatttatatctacccaataaaataaagagtatcgaggtgtggccaagggcatagaccactggctataagatttgg

SEQ ID NO: 71081 - DNA, 110 bp, synthetic construct
  source 1..110: mol_type = other DNA
cttgtggccactggctcctgtactggacaatgcaaggctagctgtcaagaaacatctctgttccatccctttttgctgctgtcgttgttgtcaaccaatcttcagtatac

SEQ ID NO: 71082 - DNA, 110 bp, synthetic construct
  source 1..110: mol_type = other DNA
ctctgttccatccctttttgctgctgtcgttgttgtcaaccaatcttcagtatacctaagtccaaacacttctttaagaaattctttcagtattatcaaaaatgaggaag

SEQ ID NO: 71083 - DNA, 110 bp, synthetic construct
  source 1..110: mol_type = other DNA
atcctggagaagctattctgctgtggtggggtagagctttcttagttgactccgtgttcattctataatccaacctatctggttggatctggactagtggagtaaactcc

SEQ ID NO: 71084 - DNA, 110 bp, synthetic construct
  source 1..110: mol_type = other DNA
aaaaatgtaaaccaagtggcctagttaccaaaaaaacacccttctcctcctaagccgaggaacgacttcagagtttggcctgcgctagttttatcttcaagttttctccg

SEQ ID NO: 71085 - DNA, 110 bp, synthetic construct
  source 1..110: mol_type = other DNA
cgaggaacgacttcagagtttggcctgcgctagttttatcttcaagttttctccgagtttgtccatgaactcaaatgtattcaagtagtcagaacgttgcacgctacaag

SEQ ID NO: 71086 - DNA, 110 bp, synthetic construct; identical to SEQ ID NO: 71084
  source 1..110: mol_type = other DNA

SEQ ID NO: 71087 - DNA, 110 bp, synthetic construct; identical to SEQ ID NO: 71085
  source 1..110: mol_type = other DNA

SEQ ID NO: 71088 - DNA, 110 bp, synthetic construct
  source 1..110: mol_type = other DNA
agctataatgatgcatctttgattggtaattctaggtcatatgatgaaaatcccagaaagggatttatgagaccatcttgactgcatttaatgatatgaattacaaacta

SEQ ID NO: 71089 - DNA, 110 bp, synthetic construct
  source 1..110: mol_type = other DNA
ttcattattttctgtagcacaaaaaaagtgataacatagaaacttgagcccaattgtttgggtttaaattctggctccatctcttctagttatgtgactttgggcaactt

SEQ ID NO: 71090 - DNA, 110 bp, synthetic construct
  source 1..110: mol_type = other DNA
gtttgggtttaaattctggctccatctcttctagttatgtgactttgggcaacttacttcaccttgtgcctcagcatcctcatctgtacaactggaacttgacagtacct

SEQ ID NO: 71091 - DNA, 110 bp, synthetic construct
  source 1..110: mol_type = other DNA
ggctcacaagcctttaagtttgattgtcagcaggagatcaccttcatggaattaattcaccttcattaatcattttggcatccttgtcacaactaccttttgtgactcca

SEQ ID NO: 71092 - DNA, 110 bp, synthetic construct
  source 1..110: mol_type = other DNA
tgtttgccttcacaaaattctgtagctcggttgcagtagccttgtctcagtcattttggagaaggggtcaaagacaatagaaatctgctttgcgctgaagcagaagagag

SEQ ID NO: 71093 - DNA, 110 bp, synthetic construct
  source 1..110: mol_type = other DNA
aacctacaccacagctcatggtttcatttccactgtgccacgacaggaactccgttttcgtttttttgagcccccaaatttcgtagccaagattggcctctgtacactgg

SEQ ID NO: 71094 - DNA, 110 bp, synthetic construct
  source 1..110: mol_type = other DNA
ggaactccgttttcgtttttttgagcccccaaatttcgtagccaagattggcctctgtacactggcactgttaagtcacagagatggttttgggtgaagcagaaagaaca

SEQ ID NO: 71095 - DNA, 110 bp, synthetic construct
  source 1..110: mol_type = other DNA
ctacctttgagttattctgcaggatctaaggctcctaacccaggacagtaacttcaggctgagcccaagattcctggaacaccaccttgttacctcactgccaacagatc

SEQ ID NO: 71096 - DNA, 110 bp, synthetic construct
  source 1..110: mol_type = other DNA
aggctgagcccaagattcctggaacaccaccttgttacctcactgccaacagatcagacgaaagtcacacacctgcagttctcatcccaatttttgcctgtacaaatttc

SEQ ID NO: 71097 - DNA, 110 bp, synthetic construct
  source 1..110: mol_type = other DNA
cctggccagggaacttccacaggctgcaggtatggccaaaacagaaaacaacaaaacaagggaggaaattaaggattttgatctggctgttttagctaatattgagctgt

SEQ ID NO: 71098 - DNA, 110 bp, synthetic construct
  source 1..110: mol_type = other DNA
acaagggaggaaattaaggattttgatctggctgttttagctaatattgagctgttttgtgacctatgcttttattcagatattactaatattagacaccagggcccctg

SEQ ID NO: 71099 - DNA, 110 bp, synthetic construct; identical to SEQ ID NO: 71097
  source 1..110: mol_type = other DNA

SEQ ID NO: 71100 - DNA, 110 bp, synthetic construct; identical to SEQ ID NO: 71098
  source 1..110: mol_type = other DNA

SEQ ID NO: 71101 - DNA, 110 bp, synthetic construct
  source 1..110: mol_type = other DNA
tctgggattagaaaaaattctattccacccagaagtatagaagctgaccccttggtaatatcagtaataccaaggtctccaacgacactgttattttaaaatgatgtcca

SEQ ID NO: 71102 - DNA, 110 bp, synthetic construct
  source 1..110: mol_type = other DNA
taatatcagtaataccaaggtctccaacgacactgttattttaaaatgatgtccagtctatctctgcataatgttattcgttcttaagcaaatggtggtcaggagatatg

SEQ ID NO: 71103 - DNA, 110 bp, synthetic construct; identical to SEQ ID NO: 71101
  source 1..110: mol_type = other DNA

SEQ ID NO: 71104 - DNA, 110 bp, synthetic construct; identical to SEQ ID NO: 71102
  source 1..110: mol_type = other DNA

SEQ ID NO: 71105 - DNA, 110 bp, synthetic construct
  source 1..110: mol_type = other DNA
atagccactgcacacatgatgcagaatgtaaaactctaacatgacgttcaactattacatcagttcagatgtatctcctagactagatatttcatttttagtatatctga

SEQ ID NO: 71106 - DNA, 110 bp, synthetic construct
  source 1..110: mol_type = other DNA
taggctgtaatttgctaatcacactaggtttgaatggtggttgacaacactggattatgtctcccaaggactacacacccacagtttctattagattcatgatgtactca

SEQ ID NO: 71107 - DNA, 110 bp, synthetic construct
  source 1..110: mol_type = other DNA
atttctaaatctgttacttctccaaaaagtctgtttttagtttggggccaaatcatctacagatttccataagaattaagaaattatgattaattcctcccattgaccca

SEQ ID NO: 71108 - DNA, 110 bp, synthetic construct
  source 1..110: mol_type = other DNA
gatatatctcagtatcacaaaagactttaaagccattttttagaaaactgatatagtggagaaatacagaatacattacatgcattttcccctcaggcatgcaagtcaag

SEQ ID NO: 71109 - DNA, 110 bp, synthetic construct
  source 1..110: mol_type = other DNA
cccaagaatccctgttctctctagaaatgagattttcaccgcaagctccacctcctcaggtgtggtatatatgcttttaaccgcctatctcacagccattcccccatccc

SEQ ID NO: 71110 - DNA, 110 bp, synthetic construct
  source 1..110: mol_type = other DNA
taacagaaagctttcgtggtctcatgtaaccaagcttataaccatatgcacgcctcatgtgaccaagaaaatcactcatctctctactatgtccaattctgaattctttg

SEQ ID NO: 71111 - DNA, 110 bp, synthetic construct
  source 1..110: mol_type = other DNA
aattgttcatttctttctggctgtagtccatctgcagaacctcgtttgtgaccccatcataacaactgtcacctcaagctttgctctattaaggcagctgaaatgcttct

SEQ ID NO: 71112 - DNA, 110 bp, synthetic construct
  source 1..110: mol_type = other DNA
atcataacaactgtcacctcaagctttgctctattaaggcagctgaaatgcttctctgaagcttcttgtggttgtgtcttctgtaatactgtgttggatttagggcttcc

SEQ ID NO: 71113 - DNA, 110 bp, synthetic construct
  source 1..110: mol_type = other DNA
caagagtagtaattgtgagtaataattcagatcacagtttaagctaagaagggaaagggagcgtttagaacagagagtggcattataggggaattggttgatcacgtata

SEQ ID NO: 71114 - DNA, 110 bp, synthetic construct
  source 1..110: mol_type = other DNA
cctcgaggggattctgaggtacagaaatgtgatcttgtttctgtataaccaaaacattaatattaatagtgctttcagtacacttgcttagcaagcaaacccttctcccc

SEQ ID NO: 71115 - DNA, 110 bp, synthetic construct
  source 1..110: mol_type = other DNA
catgaattaagtaagaagacatggcaatttccgccactctgttccctcactctcgagttctatagctggtgcccaccaaaaccctggggacccacccttcaatggcgtga

SEQ ID NO: 71116 - DNA, 110 bp, synthetic construct
  source 1..110: mol_type = other DNA
ccttaatatctttctctggaattccatgtaccctagcatagaaatacagatgttcttccacagttaccaggtcgtccaaggcgtcttcctgaggacagtagccaattaat

SEQ ID NO: 71117 - DNA, 110 bp, synthetic construct
  source 1..110: mol_type = other DNA
ttccacagttaccaggtcgtccaaggcgtcttcctgaggacagtagccaattaatgagctgtgagagtcaatgtgagccagagatctgaattgagagaatcaaaaacaca

SEQ ID NO: 71118 - DNA, 110 bp, synthetic construct; identical to SEQ ID NO: 71116
  source 1..110: mol_type = other DNA

SEQ ID NO: 71119 - DNA, 110 bp, synthetic construct; identical to SEQ ID NO: 71117
  source 1..110: mol_type = other DNA

SEQ ID NO: 71120 - DNA, 110 bp, synthetic construct
  source 1..110: mol_type = other DNA
ccatccatccataaacccatcactgccaagggaaatgggattacaacaaatagcgccttccataaatagatcatcttctgaaaggggtaaactggaataaaattgatgtt

SEQ ID NO: 71121 - DNA, 110 bp, synthetic construct
  source 1..110: mol_type = other DNA
agtcaataaaaagaacaggcttaccctagtgaagagctcatgcttcagaagggcagcattaacaaaaacaaaggtgggaaggactgatacggtgttagtttttctgattc

SEQ ID NO: 71122 - DNA, 110 bp, synthetic construct
  source 1..110: mol_type = other DNA
ctgagcttcttctttgtgattaaagatgaatcttatcgtaggtgattggtactcacacagcatgcatggcaaagtaaagttttaaagtaaaaattattctttaactgcta

SEQ ID NO: 71123 - DNA, 110 bp, synthetic construct
  source 1..110: mol_type = other DNA
atctgggagagggagtggggcagggccaacctctgctctacaagttacattttctgggctcccacatctgctgacttcctactgggttcagccaatgaaagaccctgatg

SEQ ID NO: 71124 - DNA, 110 bp, synthetic construct
  source 1..110: mol_type = other DNA
taaatacatgaaaatctagagctttattgcatatcagtaatgactgatatgtgcaaatataatggaagaaaaaagacaccaatcacaatagtcacccaacttcagtccaa

SEQ ID NO: 71125 - DNA, 110 bp, synthetic construct
  source 1..110: mol_type = other DNA
caaatcttagagatataggaggggagtggtgagcaagacaaagcaggcacccacagggcatttgtgagtaggcctcagggagctggagggatgaatgtgtgcttgcatca

SEQ ID NO: 71126 - DNA, 110 bp, synthetic construct
  source 1..110: mol_type = other DNA
agataccctgttcacaagtaatcaggagttaactatcctccctgtaccacaagccagaccttagaatttcctaactcgtgcccaccccatttccaacctggtgtttcatt

SEQ ID NO: 71127 - DNA, 110 bp, synthetic construct
  source 1..110: mol_type = other DNA
agaccttagaatttcctaactcgtgcccaccccatttccaacctggtgtttcattaagatcagagagctcataaacatcattcctggagctcacatttccctcacatccc

SEQ ID NO: 71128 - DNA, 110 bp, synthetic construct
  source 1..110: mol_type = other DNA
ccatggcagtccctgggacaaatggttctgccaccaaagagcatacaacctaacaggaaagacaagaccaacttggatgaaataatgcagagcaatgtatacaagaggca

SEQ ID NO: 71129 - DNA, 110 bp, synthetic construct
  source 1..110: mol_type = other DNA
gacacggctcaaagcacaacaaaaaaggatgactttctcttccaactcttttcctgtcccaccagacagatgcatcggccagtccccaagtccattcttactcaaggcca

SEQ ID NO: 71130 - DNA, 110 bp, synthetic construct
  source 1..110: mol_type = other DNA
ctctgaggcgtggccattccatgaccagtgaggatcaggcagggtgaccctgacgctgacccttcaccatttttctcctctgggtgaggggcacttggttggaaagtccc

SEQ ID NO: 71131 - DNA, 110 bp, synthetic construct
  source 1..110: mol_type = other DNA
ccactgctctctcaggaaaccagaagccattatggcaaaggaaagtggccccaagaagctggctggctaggctgtctgtggacgggcctgcctccccagctgctccccac

SEQ ID NO: 71132 - DNA, 110 bp, synthetic construct
  source 1..110: mol_type = other DNA
aagctggctggctaggctgtctgtggacgggcctgcctccccagctgctccccaccccgacccccgcgaggccccagacagcaggatggtctctcctgaccctgccctct

SEQ ID NO: 71133 - DNA, 110 bp, synthetic construct
  source 1..110: mol_type = other DNA
cctagcatgggtctatttttagccaggcccaggcagggctgccagccagctacccggtgttattctagaacatggggtcatcggtaaaagggagccatggcagaggctgc

SEQ ID NO: 71134 - DNA, 110 bp, synthetic construct
  source 1..110: mol_type = other DNA
ggtgttattctagaacatggggtcatcggtaaaagggagccatggcagaggctgcagaaatagcacccctgccaggaggtgccctgcagattggagaggtgagaagaaca

SEQ ID NO: 71135 - DNA, 110 bp, synthetic construct
  source 1..110: mol_type = other DNA
aacaaataatacacttcatataaatgtgatgagtatcatctgataagttttaactttaatacatacccatgaagccatcaccatattcaaaacaacaaacacaagcccca

SEQ ID NO: 71136 - DNA, 110 bp, synthetic construct
  source 1..110: mol_type = other DNA
acgccagctcccccccccagtcttagcaaaccaccatctcttcccacactggtgccaacttcttcatttattgcccatcccaacccctggtccagccccgccagcctgaa

SEQ ID NO: 71137 - DNA, 110 bp, synthetic construct
  source 1..110: mol_type = other DNA
caacttcttcatttattgcccatcccaacccctggtccagccccgccagcctgaagggggccgtcaactattggctggccagagacctacacaccagccagaccctatcc

SEQ ID NO: 71138 - DNA, 110 bp, synthetic construct
  source 1..110: mol_type = other DNA
ccctttccccagtatctgcacccagcttacattctctcttttttttttaatggccacaccccttgcatgtgaaagtttctggtccagggatcaaacccaactcacagcag

SEQ ID NO: 71139 - DNA, 110 bp, synthetic construct
  source 1..110: mol_type = other DNA
acaccccttgcatgtgaaagtttctggtccagggatcaaacccaactcacagcagtgacccgaactacagcagttgacaatgcctgatccttaactgctaggccaccagg

SEQ ID NO: 71140 - DNA, 110 bp, synthetic construct
  source 1..110: mol_type = other DNA
ccaggactcacgctccagagctgactttgagggaacccacatccttgctggtccagcccatggagggcagggatgggtagtcatcattgagttcaaacttgcagccctgg

SEQ ID NO: 71141 - DNA, 110 bp, synthetic construct
  source 1..110: mol_type = other DNA
gcccatggagggcagggatgggtagtcatcattgagttcaaacttgcagccctggaagttttccccttcaaacagtgtcacacggctgtcactgtggttctaaggcgcag

SEQ ID NO: 71142 - DNA, 110 bp, synthetic construct; identical to SEQ ID NO: 71140
  source 1..110: mol_type = other DNA

SEQ ID NO: 71143 - DNA, 110 bp, synthetic construct; identical to SEQ ID NO: 71141
  source 1..110: mol_type = other DNA

SEQ ID NO: 71144 - DNA, 110 bp, synthetic construct
  source 1..110: mol_type = other DNA
tggtacttggcatggactgccttgggccgtagcccttagctttttgccgatatcctatttcttcagctagattttagaagattatgtatgtatttgaccagttattatgt

SEQ ID NO: 71145 - DNA, 110 bp, synthetic construct
  source 1..110: mol_type = other DNA
tatttcttcagctagattttagaagattatgtatgtatttgaccagttattatgtgtgcatgcttcagaattcaaaaggtaccaaagagatttaccagcagcaaaaatac

SEQ ID NO: 71146 - DNA, 110 bp, synthetic construct
  source 1..110: mol_type = other DNA
ttattaagctctaacgtgtcaggtatgaagctaatatctcagagcccttttcttgttaatcgctatgtctgatgtgcccccaagtgttcagatgggggaaaccgaggccc

SEQ ID NO: 71147 - DNA, 110 bp, synthetic construct
  source 1..110: mol_type = other DNA
atcctcggtggctagtttgtataaagacacatgcagcacagtccctgccttcctccagaaacataaactactgtagattccccgctgccctgtcctgtttgagaaccctt

SEQ ID NO: 71148 - DNA, 110 bp, synthetic construct
  source 1..110: mol_type = other DNA
cagaaacataaactactgtagattccccgctgccctgtcctgtttgagaacccttttctgtcttcctttatttcctatcttgggacattcaggagagagacccttggccc

SEQ ID NO: 71149 - DNA, 110 bp, synthetic construct; identical to SEQ ID NO: 71147
  source 1..110: mol_type = other DNA

SEQ ID NO: 71150 - DNA, 110 bp, synthetic construct; identical to SEQ ID NO: 71148
  source 1..110: mol_type = other DNA

SEQ ID NO: 71151 - DNA, 110 bp, synthetic construct
  source 1..110: mol_type = other DNA
cagccttgcctctgcctccctaaatgggcttgttctgagagtctagaggatgcaagctggttctctggggcccggtaggggcagtagattgcaggatgaggcttcctgag

SEQ ID NO: 71152 - DNA, 110 bp, synthetic construct
  source 1..110: mol_type = other DNA
gctggttctctggggcccggtaggggcagtagattgcaggatgaggcttcctgagaggtggggtagatgatggaggcagtggcgtgaggacagggtgcagtgatggggct

SEQ ID NO: 71153 - DNA, 110 bp, synthetic construct
  source 1..110: mol_type = other DNA
gatcagctctgccctttttccctctggctgctgttctcacctgtgctggcctttgcttgtattgtttttcccaactctcttttgcggctatagtcagaacaccccaaggt

SEQ ID NO: 71154 - DNA, 110 bp, synthetic construct
  source 1..110: mol_type = other DNA
cttgtattgtttttcccaactctcttttgcggctatagtcagaacaccccaaggtgtgaggagaatgcgatctcccacagcatctcaccctaagacagctgtttggtgtt

SEQ ID NO: 71155 - DNA, 110 bp, synthetic construct; identical to SEQ ID NO: 71153
  source 1..110: mol_type = other DNA

SEQ ID NO: 71156 - DNA, 110 bp, synthetic construct; identical to SEQ ID NO: 71154
  source 1..110: mol_type = other DNA

SEQ ID NO: 71157 - DNA, 110 bp, synthetic construct
  source 1..110: mol_type = other DNA
cctatgatctgcccatgcattctgcctgtagctaaggtcatttcccaggaaaaatggagaaagaagtccacagagaaaaaaacaaggtattccatgctagtggtgatatt

SEQ ID NO: 71158 - DNA, 110 bp, synthetic construct
  source 1..110: mol_type = other DNA
ggagaaagaagtccacagagaaaaaaacaaggtattccatgctagtggtgatattcaacccctggcttcttctttcttcttagggctgcacttgtggcatatggaggttc

SEQ ID NO: 71159 - DNA, 110 bp, synthetic construct
  source 1..110: mol_type = other DNA
tcttgactctaggaccctaatcatcctgttcttacagtctgtactttagaaaacttgcagttatacatcctctctctaccccgttgacatgtaaatctttgaacaccctc

SEQ ID NO: 71160 - DNA, 110 bp, synthetic construct
  source 1..110: mol_type = other DNA
tgcagttatacatcctctctctaccccgttgacatgtaaatctttgaacaccctcttgcttttataacctgggcatgtctttgtcaaggatctgtgaacaatgtctttga

SEQ ID NO: 71161 - DNA, 110 bp, synthetic construct
  source 1..110: mol_type = other DNA
ggctgcttctgcagtgttgggtgtccatctcatcttgcagtgtgtggtcctcacgaggatggtcaaagctggcttactcccaccacgtctatatccatcacacactgaac

SEQ ID NO: 71162 - DNA, 110 bp, synthetic construct
  source 1..110: mol_type = other DNA
ttgagaaaatattaaagaagaaaatgctcgtggagtaagaatggccagggaagacatctctgggaaggttacaattttattgtgacctaaagaataaaaaggtacaaggc

SEQ ID NO: 71163 - DNA, 110 bp, synthetic construct
  source 1..110: mol_type = other DNA
aacatatatggaccataatatctttaaattagcaattcctcagtgataactctcaatataaaaactagcttagattccaacaccaaaatgcaatgacattaggatttccc

SEQ ID NO: 71164 - DNA, 110 bp, synthetic construct
  source 1..110: mol_type = other DNA
aatcgtagcagagatattcaataaaacgttctgtactgatggaaatattctatatctatgctattcaatatggcagaagtgcatagctatcaaacccttgaaacatatgt

SEQ ID NO: 71165 - DNA, 110 bp, synthetic construct
  source 1..110: mol_type = other DNA
tctcaaaccaaccctcctctgactccctaagggttagggccgggttttcctccggagactgggtcccagcgggagcgcgacggcggggaggtggaagcgcctttcccgct

SEQ ID NO: 71166 - DNA, 110 bp, synthetic construct
  source 1..110: mol_type = other DNA
gctgaggagaagggagccagggcaacgtgaacatccttgcagatggagctgcatggaggaagagctagtccaagtttctggaagtggctgagtgatcagtgtgaaaggag

SEQ ID NO: 71167 - DNA, 110 bp, synthetic construct
  source 1..110: mol_type = other DNA
tgaagaaggtattgttatttttattcccattttatagataaagacactgaggtgtagagaaattaataacatgacctaggtaacagctaataagtagaaaatccaggata

SEQ ID NO: 71168 - DNA, 110 bp, synthetic construct
  source 1..110: mol_type = other DNA
agggtggattctgaagcaacagtttacatgaagagaagaacagattccttttgagtgagaagtttcatgtcttaagaagcttaactcatcaggttatgcgggaaagatgc

SEQ ID NO: 71169 - DNA, 110 bp, synthetic construct
  source 1..110: mol_type = other DNA
gtagctggagccaagaacaagtccgggtgatgctaacactgttttattaagcaggagaagtgtaaggaacagcagtagtacagtaatgacacagaacaaagtctaggagt

SEQ ID NO: 71170 - DNA, 110 bp, synthetic construct
  source 1..110: mol_type = other DNA
gattagagagcattgatttgtcgtgcatccatttatatataaaaattataccatgtacatgagtattggctatctagccaagagctaatgcacacatacaatattttatc

SEQ ID NO: 71171 - DNA, 110 bp, synthetic construct
  source 1..110: mol_type = other DNA
gcatcatgtcttattctccactagaacccattgccaacgcagggccaggcaccaagtaggtgctgtataaatatttatatggataagtgaataaatgccaagttggttcc

SEQ ID NO: 71172 - DNA, 110 bp, synthetic construct
  source 1..110: mol_type = other DNA
tacaccagggaggtggccactgaagaggggtgggaggagcttgtcttactccctgaggaagaatggatggcatctggcacttccaagtgtatcagcaatatgaacttgag

SEQ ID NO: 71173 - DNA, 110 bp, synthetic construct
  source 1..110: mol_type = other DNA
agcttaaagccctttgaacaacattatctcattaatgctctcatttgccaggcagcactggcaggagggagaggaggctgaaaatgatttttctttagactttgagctga

SEQ ID NO: 71174 - DNA, 110 bp, synthetic construct
  source 1..110: mol_type = other DNA
cacccaagccactgcagtgacaacattggatccttaacccactgagtcacatggtactccatatggtcatccccctcacccctccctataaataaatgccttcagctttg

SEQ ID NO: 71175 - DNA, 110 bp, synthetic construct
  source 1..110: mol_type = other DNA
actccatatggtcatccccctcacccctccctataaataaatgccttcagctttgttgtagaacttgactaagttacttatggtttggtctttttggagctcacatttaa

SEQ ID NO: 71176 - DNA, 110 bp, synthetic construct
  source 1..110: mol_type = other DNA
cgtgttgccttgtgaataggaattctaaaattcaaattctacgaagtaccttctttttcttttaatcacgtatttaaacccaaacagagttcctggcttactgtggtatc

SEQ ID NO: 71177 - DNA, 110 bp, synthetic construct
  source 1..110: mol_type = other DNA
tttcttttaatcacgtatttaaacccaaacagagttcctggcttactgtggtatcaaggtgcatgaatactaaaattttcaacctgtgcccaaaatactgcccccggaaa

SEQ ID NO: 71178 - DNA, 110 bp, synthetic construct
  source 1..110: mol_type = other DNA
ctctgtcctcgtacagctgcagtcagcacagtagttcatttgactcaaagtcaaaaccaccaaggtcctgacaatccagcgtctgctgagaaggaacgctctttatttgt

SEQ ID NO: 71179 - DNA, 110 bp, synthetic construct
  source 1..110: mol_type = other DNA
agatgatgatagttgaggggaaaaaaaagcacagtttgatctgcccgtggcgcgtccccaccacacctttgcatagagcgcctcctttctcttctcactgatgttactcc

SEQ ID NO: 71180 - DNA, 110 bp, synthetic construct
  source 1..110: mol_type = other DNA
ttttactgtggggctctttgctctcatgtgcacttgaggacaaggtgggttcatctgagaactccttttaaaaattttatttacaggaggatttagagttctagtgagaa

SEQ ID NO: 71181 - DNA, 110 bp, synthetic construct
  source 1..110: mol_type = other DNA
tttgtcaatctaagaagaataaatagtagtgtctcaatattgttttaatatgtgctactcagggtactagagaggaagaatgagttttcattcatttatctgttgtttgc

SEQ ID NO: 71182 - DNA, 110 bp, synthetic construct
  source 1..110: mol_type = other DNA
agaataaatagtagtgtctcaatattgttttaatatgtgctactcagggtactagagaggaagaatgagttttcattcatttatctgttgtttgcatttgtgctcattcg

SEQ ID NO: 71183 - DNA, 110 bp, synthetic construct
  source 1..110: mol_type = other DNA
agtccaaaacagaggaatgtttacagctacagcagtgggtgattgaactgacacgtcactaattctattagattcttccctgaatcacaaccaataactctgggaataag

SEQ ID NO: 71184 - DNA, 110 bp, synthetic construct
  source 1..110: mol_type = other DNA
ttgccttagtgagtgacacagacgccacctgctggggataaggcagctcaaactgccttgcaagccctaatatgcattattattctttgaatttctaatcttctggtcca

SEQ ID NO: 71185 - DNA, 110 bp, synthetic construct
  source 1..110: mol_type = other DNA
ggggccagggatgctgcctgtcctgcaatgttcaaaactgtcccacacaatgaactgccctgcttcctgcaaaactttcaaacgccccactgcacagtcatgttggtgag

SEQ ID NO: 71186 - DNA, 110 bp, synthetic construct
  source 1..110: mol_type = other DNA
tgccctgcttcctgcaaaactttcaaacgccccactgcacagtcatgttggtgagaaacctgctgtcctgaccatctgagcccagagccccactgtttgtcccgtgtaaa

SEQ ID NO: 71187 - DNA, 110 bp, synthetic construct
  source 1..110: mol_type = other DNA
cagatggccaccttctcgggtcttcacatgatctttctgctgtgcatatacttagggaaagagagggagagagaaaagagagagctctctggtgcatcttcttataagag

SEQ ID NO: 71188 - DNA, 110 bp, synthetic construct
  source 1..110: mol_type = other DNA
ggtgtcattgaaaagtgcaaagctttggttaagatttcttcagacaaaaaaccatcaaagggccacgtcagcataattttagagaaaatcttgggataatacccttctca

SEQ ID NO: 71189 - DNA, 110 bp, synthetic construct
  source 1..110: mol_type = other DNA
tcattcctttgtgttactaagcactattccctggcatgaatgtaccacagtctatggaatatttccatgacagctgctatgaacaatgatgtataggtttgtatacatat

SEQ ID NO: 71190 - DNA, 110 bp, synthetic construct
  source 1..110: mol_type = other DNA
tgcaaaagggcagctacacacagttttctacactctctccctttatatgcaggcttccaagcacttggacacagcttccaagctgtcactgcttctcagaactattttca

SEQ ID NO: 71191 - DNA, 110 bp, synthetic construct
  source 1..110: mol_type = other DNA
attaactgctgagccaggacaggaactcctctcctgtttattttcaaaatattcagacaattaacccaaccattttataatactatattaattcacatcttttagagcta

SEQ ID NO: 71192 - DNA, 110 bp, synthetic construct
  source 1..110: mol_type = other DNA
aggagaaagagtcattcaagagaaatgaacaaatacatgatcggccagtgtttttccgtaaggcctagttggcattttgcatgagatcgttctttactgagggaggctgc

SEQ ID NO: 71193 - DNA, 110 bp, synthetic construct
  source 1..110: mol_type = other DNA
ccgtaaggcctagttggcattttgcatgagatcgttctttactgagggaggctgcatcttgcacccttaggcatttagcttcttcatttttcacctattaaataccaaga

SEQ ID NO: 71194 - DNA, 110 bp, synthetic construct
  source 1..110: mol_type = other DNA
gatctgctgaatgctttatcctacctcattggtcagcggtccgctctgcagtatgtcaaaagccactgagcacgtcccaaggatctcatgcttcatctggttgagggaag

SEQ ID NO: 71195 - DNA, 110 bp, synthetic construct
  source 1..110: mol_type = other DNA
tcaaaagccactgagcacgtcccaaggatctcatgcttcatctggttgagggaagacagagcaacagacaatgggtccagggcatggatgggaaaagagatgttctccag

SEQ ID NO: 71196 - DNA, 110 bp, synthetic construct
  source 1..110: mol_type = other DNA
aaatcactgatttccttatcacttataaagcagtctagctgaagaagtcaagtaaaacaattaaaattcaagaacaaattcttacccactcactgttgcttgtatgtgtt

SEQ ID NO: 71197 - DNA, 110 bp, synthetic construct
  source 1..110: mol_type = other DNA
aacaattaaaattcaagaacaaattcttacccactcactgttgcttgtatgtgttctttgttagttcagtctttatttatgaagatgggggataatcatcactgacagaa

SEQ ID NO: 71198 - DNA, 110 bp, synthetic construct
  source 1..110: mol_type = other DNA
tgcacttgttcttttacaatggaaagttctgaggggaaaaaaaaaagccactgagaccactttggagatgattagacacctcggattataattttgtcaaaatggtgtgc

SEQ ID NO: 71199 - DNA, 110 bp, synthetic construct
  source 1..110: mol_type = other DNA
accactttggagatgattagacacctcggattataattttgtcaaaatggtgtgcttgcttgaggatcctctaaactttatctgaaactagcatccagatgtttgtccaa

SEQ ID NO: 71200 - DNA, 110 bp, synthetic construct
  source 1..110: mol_type = other DNA
tggagagagaaggagaatctagattaattctgagtaatgccggtggaagctaaataccttaaaagccattttaaatgattggtttgtactgtgaattccagatgaaggct

SEQ ID NO: 71201 - DNA, 110 bp, synthetic construct
  source 1..110: mol_type = other DNA
tccaataaagttcttaaaattatcatacgattccttgtgttttcttcctatgtgacaaacttcgagggaaaaattggttcaagttagttgacattcttacataaaatgag

SEQ ID NO: 71202 - DNA, 110 bp, synthetic construct; identical to SEQ ID NO: 71201
  source 1..110: mol_type = other DNA

SEQ ID NO: 71203 - DNA, 110 bp, synthetic construct
  source 1..110: mol_type = other DNA
atacacacatcaaagcaagcacctcattgatcttcttcacagctacattcccacacttagaactcacacataataattaaaacataatttactgaataaactagtcttgg

SEQ ID NO: 71204 - DNA, 110 bp, synthetic construct
  source 1..110: mol_type = other DNA
attacaagtgagtcagcactattttatatgctgtgtattgtttatgatgttcccattgctatccagttactaaaactaagatctgatgggtttttcttcttttgccaaat

SEQ ID NO: 71205 - DNA, 110 bp, synthetic construct; identical to SEQ ID NO: 71204
  source 1..110: mol_type = other DNA

SEQ ID NO: 71206 - DNA, 110 bp, synthetic construct
  source 1..110: mol_type = other DNA
caactcaccttccttctttccactctgcttattttcctctcacactgatcattgttgaatacatcatgtaatttacttatctcacttatctatcatttttctctccctaa

SEQ ID NO: 71207 - DNA, 110 bp, synthetic construct
  source 1..110: mol_type = other DNA
ttgagccacaacaggaactccagatgttatattttaaagtgcagaatactcatggatatgcaatctcagtaactgtatttgttcatcaaacacctggtcgagaagaatgg

SEQ ID NO: 71208 - DNA, 110 bp, synthetic construct
  source 1..110: mol_type = other DNA
atatgcaatctcagtaactgtatttgttcatcaaacacctggtcgagaagaatggtacctatcctcatctcagttaccgtaatagtaaattcacccttattataactgta

SEQ ID NO: 71209 - DNA, 110 bp, synthetic construct
  source 1..110: mol_type = other DNA
gaacatgggagaaagaagagatgtgggaggaataacatgagatttgattagccgtgttgattttgaagttccaggggcgcatctgagtgggatgttagtataaggtggtg

SEQ ID NO: 71210 - DNA, 110 bp, synthetic construct
  source 1..110: mol_type = other DNA
ctagtggtcataaatgcttttttaaaactttatggttagcattgactaggtcatagatacaggcagttaattaccagtgttcataaattattttcaagctgtgctaataa

SEQ ID NO: 71211 - DNA, 110 bp, synthetic construct
  source 1..110: mol_type = other DNA
ctaggtcatagatacaggcagttaattaccagtgttcataaattattttcaagctgtgctaataatcagacactctatatataaaagaggaaacttcatttaacaagcaa

SEQ ID NO: 71212 - DNA, 110 bp, synthetic construct
  source 1..110: mol_type = other DNA
ctggaaagataaacaaaaagaccagcgttggtggtggcctccgagaagagaagctggggaacaggggtgggaggaagccttcattttcactctataccttggggaaaaat

SEQ ID NO: 71213 - DNA, 110 bp, synthetic construct
  source 1..110: mol_type = other DNA
aggttcgagaagcacaggctaggtcacaggacagcaataattaagacaatcactgacccttctacaccggtgtgcagtttcacgggttatcctcgcagctaagcctccca

SEQ ID NO: 71214 - DNA, 110 bp, synthetic construct
  source 1..110: mol_type = other DNA
acccttctacaccggtgtgcagtttcacgggttatcctcgcagctaagcctcccagcctcccataaggaagtattcttcatcattcttcattttccattttccaaatgat

SEQ ID NO: 71215 - DNA, 110 bp, synthetic construct
  source 1..110: mol_type = other DNA
gggttaataacaacacctacctcccagaactgctgtcggatgtcactcagatcatgcacaagacagggtcctgggcagagctcccaaatattgcctactggtgtcatgag

SEQ ID NO: 71216 - DNA, 110 bp, synthetic construct
  source 1..110: mol_type = other DNA
accttccttgacctgcagtatggaaatctgcattacagatgagaccaaggccagtgctaaattgcacagaaagttgggtattgaacaacccacggggaagcttctgtcag

SEQ ID NO: 71217 - DNA, 110 bp, synthetic construct
  source 1..110: mol_type = other DNA
attaatggggtgataagcaggtcaggttttaaaccggagacatctgaagtatcacaatgactcctattttgtgaaacatcccaactttgataaagtttgtgcccttgaca

SEQ ID NO: 71218 - DNA, 110 bp, synthetic construct
  source 1..110: mol_type = other DNA
gcggctgactgtgccatcatttggtccttaacaatttaagggttgtactactattttcttactgttgactttaggagatcaatcttttgagaagatgtctcttggacata

SEQ ID NO: 71219 - DNA, 110 bp, synthetic construct
  source 1..110: mol_type = other DNA
ttcttactgttgactttaggagatcaatcttttgagaagatgtctcttggacatagcatggtggccccaggattcaaatccagtcttctggacaccaaagcccactttct

SEQ ID NO: 71220 - DNA, 110 bp, synthetic construct
  source 1..110: mol_type = other DNA
aatgattcatgcagtgtgaggaagtaggtcactgtcagtgaaaacgacttagggaaaattcacttatttcaccagagagtgacgtgtccacttactggaaatggagttgt

SEQ ID NO: 71221 - DNA, 110 bp, synthetic construct
  source 1..110: mol_type = other DNA
aaattcacttatttcaccagagagtgacgtgtccacttactggaaatggagttgtctatatgttgggactcaagtttagtctgtgaaccagcagcattggtgtctcttag

SEQ ID NO: 71222 - DNA, 110 bp, synthetic construct
  source 1..110: mol_type = other DNA
tctactggaatgttgggaccacacagctcacaattaaaactctaaaaacccggagcagtagaatagatggagtagaaagtgaatccccagtttgcttgactttcaaatgc

SEQ ID NO: 71223 - DNA, 110 bp, synthetic construct
  source 1..110: mol_type = other DNA
ttcttaaatagttacctccactgtcctcttgttactctgttaaagagaaacttctttgaatttttcaaatgtcctcacagtaaaacatcatgttacgttccctaataagt

SEQ ID NO: 71224 - DNA, 110 bp, synthetic construct
  source 1..110: mol_type = other DNA
ttatgtgtatgaagaacacatttgagaaggaaactctggtttgcaacaacaaaaatagagctgtagggcattatactaagtgaagtaagtcagacatagaaggacaaata

SEQ ID NO: 71225 - DNA, 110 bp, synthetic construct; identical to SEQ ID NO: 71224
  source 1..110: mol_type = other DNA

SEQ ID NO: 71226 - DNA, 110 bp, synthetic construct
  source 1..110: mol_type = other DNA
tcattgagtcatgaggacttactattttttaggacttcattttagtttcaacctaagaggcccctccttgaggtatttgccaactgaatgacaggcactggactgcagca

SEQ ID NO: 71227 - DNA, 110 bp, synthetic construct
  source 1..110: mol_type = other DNA
attttaaagtccccttttcctgcattcacccccaaaactaccatttccagagtgccgttaactggatgaggcatatcgcacccgtaattactaatcctttccataacaca

SEQ ID NO: 71228 - DNA, 110 bp, synthetic construct
  source 1..110: mol_type = other DNA
cgttaactggatgaggcatatcgcacccgtaattactaatcctttccataacacattcagctcagtgtccttatcgccatgagaaagctgaggttcaggtagaggttaat

SEQ ID NO: 71229 - DNA, 110 bp, synthetic construct
  source 1..110: mol_type = other DNA
agaagaaggagcaggaaggcaagagctgcagtgggaaaagatctgcttccacatgaggggaactttggcctgagcatgagacagccctaaaaagagacagaagttccatg

SEQ ID NO: 71230 - DNA, 110 bp, synthetic construct
  source 1..110: mol_type = other DNA
ttttcttctgtcccatttcttcacttgtaaaatggaagatataaacaagcattccttctaaatttatttccccaaccaatgcctctgtcaaaagcaaaacccaaaagaag

SEQ ID NO: 71231 - DNA, 110 bp, synthetic construct
  source 1..110: mol_type = other DNA
agcagtgttggagaaggcaccgactgttccctaatcacgagcttggggacggatgtctatttgatttaactttcatgtaagctgcaccttcactgacactgtgggcgagg

SEQ ID NO: 71232 - DNA, 110 bp, synthetic construct
  source 1..110: mol_type = other DNA
gcaccttttgaccttagacttcattcccaaagagccagccagctcaccgtaggttcaagggaacgtgttgggcacctaccatgttccagacctttgtgtgtcttgtgctt

SEQ ID NO: 71233 - DNA, 110 bp, synthetic construct
  source 1..110: mol_type = other DNA
ggggatgcaggtttgatccctggcctagctcagtaggtttaggatctggctttaccagcaagctctggtgtactttgcagatattgctcagatccagtgttgctgtagct

SEQ ID NO: 71234 - DNA, 110 bp, synthetic construct
  source 1..110: mol_type = other DNA
tagctcagtaggtttaggatctggctttaccagcaagctctggtgtactttgcagatattgctcagatccagtgttgctgtagctgtggcacaggcctgcagcggcagct

SEQ ID NO: 71235 - DNA, 110 bp, synthetic construct
  source 1..110: mol_type = other DNA
aggagaaactggaagggggacaatgcagcatgaatgccctgataaccaagcctgtatcaataaccaagctcccttctctgccctctcctgtcggggccccatgtcggact

SEQ ID NO: 71236 - DNA, 110 bp, synthetic construct
  source 1..110: mol_type = other DNA
gtgctgtaacatgcagtccctgctagtggcttccaagtgtccttctttgtggttctgggcccctgtgggagctctgtctggtacccaccccccacctctgatttgtgtct

SEQ ID NO: 71237 - DNA, 110 bp, synthetic construct
  source 1..110: mol_type = other DNA
tttcctatttgaactcctattgtaatgtcttggtaggttgaaaccagcctcgaccccttcccagtggcatcttgagtccctgcgcaattgttacatgtttgcccagctac

SEQ ID NO: 71238 - DNA, 110 bp, synthetic construct
  source 1..110: mol_type = other DNA
ccttcccagtggcatcttgagtccctgcgcaattgttacatgtttgcccagctaccgccccacctcctgcccaggatgggcgctccctgctgcattcttggctgtacccc

SEQ ID NO: 71239 - DNA, 110 bp, synthetic construct
  source 1..110: mol_type = other DNA
atttaattcagttaacgaaccccttcctgtgccggccttactctagacttttactttattttatttttggcttttctttttttttttttgtatttcaaggcccgctccca

SEQ ID NO: 71240 - DNA, 110 bp, synthetic construct
  source 1..110: mol_type = other DNA
cctgggccactgaacacatagactgacagagaccccagatgctattaatgaagccgttacattgttgatacattatgtattacgaaactaattctttaaaaatctcttct

SEQ ID NO: 71241 - DNA, 110 bp, synthetic construct
  source 1..110: mol_type = other DNA
gttacattgttgatacattatgtattacgaaactaattctttaaaaatctcttctcacttgaaacttgtttactgcatagtcagtccctatccttggctggttgcagaaa

SEQ ID NO: 71242 - DNA, 110 bp, synthetic construct
  source 1..110: mol_type = other DNA
gtttgagatcgattttgacagctttccggatattcaaataaatccacgtccaggctaagcaaaataccttttgtgcaaagcttcattcgatgttaggctcttaagaagtg

SEQ ID NO: 71243 - DNA, 110 bp, synthetic construct
  source 1..110: mol_type = other DNA
gcataatatcctcaaggtccatccatgttatttcaaatggcaagattttttccttttatgtgactgagtagtattccatggtgtgtgtataccatatcttctttatccat

SEQ ID NO: 71244 - DNA, 110 bp, synthetic construct
  source 1..110: mol_type = other DNA
ttatgtgactgagtagtattccatggtgtgtgtataccatatcttctttatccatgcatctatttgatgggcacttaggttatgtctatatcttggctattgtaaataat

SEQ ID NO: 71245 - DNA, 110 bp, synthetic construct
  source 1..110: mol_type = other DNA
cttgcagatgaaatatgctttaatcggatctttagaacataaaattacccaaattgtgttatatgcagagtttttacagaacgtgcttttggagcatgagcttaacacga

SEQ ID NO: 71246 - DNA, 110 bp, synthetic construct
  source 1..110: mol_type = other DNA
tgctagagagccaccatgggaactcctccacatataaatttgggggtgagacacgaaccttccgtctctagctcctcatgaccaaagacagtcagggttaggagcagccc

SEQ ID NO: 71247 - DNA, 110 bp, synthetic construct
  source 1..110: mol_type = other DNA
actctgtccagacacaggcgtacagccctgttagtaggaggcaagtaactgaaccttgctgggcctcaacctcgtcccctgcgtgaagggagcaatagaatgaagcccgt

SEQ ID NO: 71248 - DNA, 110 bp, synthetic construct
  source 1..110: mol_type = other DNA
agtctgaggcaggtgatgggatggagggggaggcggggccacatagtctttgagttaagtccagtttataattcttagtttagtatagaatcattgccatgtgttatctg

SEQ ID NO: 71249 - DNA, 110 bp, synthetic construct
  source 1..110: mol_type = other DNA
cctctaacttgtgcaggatggaccctcctgggaaggtcctgtggctgcagggtggggatgtcctcatgtttcttccacactttgcctcttccggctagcggaggtaaacc

SEQ ID NO: 71250 - DNA, 110 bp, synthetic construct
  source 1..110: mol_type = other DNA
ggatgtcctcatgtttcttccacactttgcctcttccggctagcggaggtaaaccagctcaaacctgcgtgtcagacctaatgccgtttaagaaaccctgccccgggccg

SEQ ID NO: 71251 - DNA, 110 bp, synthetic construct
  source 1..110: mol_type = other DNA
gacgcaggttcaatccccggtccggcacagtgggttaagaatctggcgttgcagcagctgcagcttcggtggagactgtagctcagatctaatccctggcctgggaattc

SEQ ID NO: 71252 - DNA, 110 bp, synthetic construct; identical to SEQ ID NO: 71251
  source 1..110: mol_type = other DNA

SEQ ID NO: 71253 - DNA, 110 bp, synthetic construct
  source 1..110: mol_type = other DNA
aatgtacatgaattcagtgtgaacgagcacactggaaggtccctcagaagtggctggatcacgccttcgtgggcatgttgttcttactggcttgttttaacctgttttat

SEQ ID NO: 71254 - DNA, 110 bp, synthetic construct
  source 1..110: mol_type = other DNA
accagctgcctggactccctgcaataaacaccgcgctttccttcaccacacctcggtgtcgacgaattggctttatttcgtgtgggggagcagacccaagtttggcttcg

SEQ ID NO: 71255 - DNA, 110 bp, synthetic construct
  source 1..110: mol_type = other DNA
gtgtcgacgaattggctttatttcgtgtgggggagcagacccaagtttggcttcgtcacacagcaactatggaaaacagtatggaaattcctcaaaaatgaataatagaa

SEQ ID NO: 71256 - DNA, 110 bp, synthetic construct
  source 1..110: mol_type = other DNA
gatcaggtaccacttaccctcaaaggtgggggtttacacagaggcaggaatcccaggagagggggattgctacgggccagcattgaaagctctcgaccagctctctgact

SEQ ID NO: 71257 - DNA, 110 bp, synthetic construct
  source 1..110: mol_type = other DNA
ggagagggggattgctacgggccagcattgaaagctctcgaccagctctctgactgctttcagttttgcctctgaaagccagagagacgtggacttttacccaaccacca

SEQ ID NO: 71258 - DNA, 110 bp, synthetic construct
  source 1..110: mol_type = other DNA
gactgcgactcgggctctgcaggatgaagatgtgatccaaatgacagatcatcatcacaggtacgaaagcccaaggagttatctttttgcaaaaaaaaaaccaaaaaaaa

SEQ ID NO: 71259 - DNA, 110 bp, synthetic construct
  source 1..110: mol_type = other DNA
agatcatcatcacaggtacgaaagcccaaggagttatctttttgcaaaaaaaaaaccaaaaaaaaaaaccaaaacagtaaatgatttaacactccctgtatatactgttt

SEQ ID NO: 71260 - DNA, 110 bp, synthetic construct
  source 1..110: mol_type = other DNA
aacctaaaaaatgaaagtaagcatctgtcacccgtcccatccaggcattgcagcggagccgagctatgctgttggaggcagtgtgtgtgggggcttatctttcatgaact

SEQ ID NO: 71261 - DNA, 110 bp, synthetic construct
  source 1..110: mol_type = other DNA
ttatgagttgaacgagccttctttgctctcttctgtcaactcagtttgaagatcaggttactgttgaccataggaaataggatgtcctgtattctttcatttctgtccag

SEQ ID NO: 71262 - DNA, 110 bp, synthetic construct
  source 1..110: mol_type = other DNA
gtctttcttaccctggaatacaaacccctttacgacatggagcacgtttgtcaaatccttacaaatgtgtcaaatgaatgtttatagcatcattaattcaaccttctaac

SEQ ID NO: 71263 - DNA, 110 bp, synthetic construct
  source 1..110: mol_type = other DNA
gaatgagagtgactgcttaatggcatggggtttcttttgggatgaagcaatcatctggagataagcagtgaagctaagtagtagtgatgattaggaaacgttataaatgt

SEQ ID NO: 71264 - DNA, 110 bp, synthetic construct
  source 1..110: mol_type = other DNA
tggagataagcagtgaagctaagtagtagtgatgattaggaaacgttataaatgtattaaatgacacttaactgtacactttaaatggttgacctcgtgaatttttgcca

SEQ ID NO: 71265 - DNA, 110 bp, synthetic construct
  source 1..110: mol_type = other DNA
tttaatcagcagaatgagcacgtttccttcctcctgctgttctgattggatggcttattcagcgagcagaaagtggctccagctgactttctaaacaaatgccacccaat

SEQ ID NO: 71266 - DNA, 110 bp, synthetic construct
  source 1..110: mol_type = other DNA
gggacaaggttacctttagaaaagaggaagaaacatcacatggtccacatgcaattgcagcgtctccccatcccaaggcctcaggttgccttggtcatttctccccataa

SEQ ID NO: 71267 - DNA, 110 bp, synthetic construct
  source 1..110: mol_type = other DNA
tgcagcgtctccccatcccaaggcctcaggttgccttggtcatttctccccataactgggttaatcattatcatttgtgtccatgcagcaaaacagaaggagaattaatg

SEQ ID NO: 71268 - DNA, 110 bp, synthetic construct
  source 1..110: mol_type = other DNA
gatagagccgctgccagagaaaggcagctcagaacagggcaggagtgacaagttgtcagccattgcctcccaaacgccaaagcctgcaggaagccagccggcaaggcagg

SEQ ID NO: 71269 - DNA, 110 bp, synthetic construct
  source 1..110: mol_type = other DNA
ccctttaggagttgtgtggccagcacaagagttatctggatgactctcatgtctagttctagtacaaggctctcagtggagatgagatggctctttccctgcatcttggg

SEQ ID NO: 71270 - DNA, 110 bp, synthetic construct
  source 1..110: mol_type = other DNA
gttctagtacaaggctctcagtggagatgagatggctctttccctgcatcttgggtcaagaaacacgtgccttcgagactcataagtcctctgtcaccagcagcagacaa

SEQ ID NO: 71271 - DNA, 110 bp, synthetic construct
  source 1..110: mol_type = other DNA
aggatgtggctattgtcaagcagtctccctgctatcttgtgactcggggatgctccccaagggaaggaatctatggcttcccacagccatgattttggagttggtccacc

SEQ ID NO: 71272 - DNA, 110 bp, synthetic construct
  source 1..110: mol_type = other DNA
gacatacacgttcttgcaacacgctgccaccttgctttccttccttgctgtaacaatattcagtgcctgtaagttgccgaaaggaatggttaccacagagagggagctgc

SEQ ID NO: 71273 - DNA, 110 bp, synthetic construct
  source 1..110: mol_type = other DNA
catcggcacgtttgtctgggggaattgtgagcccagtgggtgtaactcggggaagatggataccaggctgcagaagccacacgcaggtggcaggtgagccaggtgaaggc

SEQ ID NO: 71274 - DNA, 110 bp, synthetic construct
  source 1..110: mol_type = other DNA
gtgtcgtggcaggttttggcatcttacccaggctctgtgtcctttgcgcgagcgcagaatttcagcttcctttcaggtcagcgaggcctctaagctggctggagacctag

SEQ ID NO: 71275 - DNA, 110 bp, synthetic construct
  source 1..110: mol_type = other DNA
acattttcaacttgtttatgtaaatgccgaggagtgtgatggctgggttgcgtgtaagaatgcttttagtttcacgagaaactgacaaatggtttccacggcagctgtgc

SEQ ID NO: 71276 - DNA, 110 bp, synthetic construct
  source 1..110: mol_type = other DNA
aagaatgcttttagtttcacgagaaactgacaaatggtttccacggcagctgtgccattttgcatgcccgccagcagtggatggagttcctggtgcttcacatgtttgcc

SEQ ID NO: 71277 - DNA, 110 bp, synthetic construct
  source 1..110: mol_type = other DNA
atgtgggacatgcatgctgttgtctgtgtttagggatcatttcctcgaataaagaaggaaaggttttttttattgttgcttgcacaggaatttctctctgcagcgttcac

SEQ ID NO: 71278 - DNA, 110 bp, synthetic construct
  source 1..110: mol_type = other DNA
aggaaaggttttttttattgttgcttgcacaggaatttctctctgcagcgttcacccatcactgtgtagtcacacagtttgtattttcttttttcttttttggccgcact

SEQ ID NO: 71279 - DNA, 110 bp, synthetic construct
  source 1..110: mol_type = other DNA
tctttgatgcctggttcgttcagaacttaagatgtatgtgatgttttcatgtgctctctacagcacagcctctgatttatggcgatgattggcctgctggtttccagttt

SEQ ID NO: 71280 - DNA, 110 bp, synthetic construct
  source 1..110: mol_type = other DNA
ctctacagcacagcctctgatttatggcgatgattggcctgctggtttccagtttgcaaggaggaaataatccatttttgctgaatttttataaatactgggtttgatga

SEQ ID NO: 71281 - DNA, 110 bp, synthetic construct
  source 1..110: mol_type = other DNA
gttggacatcgggctgtttccagcctttggctgagcctctgtgtacccgtctctgtacggagattgccttgcgtaaacgcccagcagtgggatagctgagtcgtatgtca

SEQ ID NO: 71282 - DNA, 110 bp, synthetic construct
  source 1..110: mol_type = other DNA
tacggagattgccttgcgtaaacgcccagcagtgggatagctgagtcgtatgtcagcctcatgttgaacttgtcaagatgctatcagactggttcccaaagtggctcagc

SEQ ID NO: 71283 - DNA, 110 bp, synthetic construct
  source 1..110: mol_type = other DNA
tagacctacgactgagcagccaccctatcttctttagtcctcggtttcctcattgacacagctggaaaaattcacaacaggaatgggagtattgaccccactcacctgca

SEQ ID NO: 71284 - DNA, 110 bp, synthetic construct
  source 1..110: mol_type = other DNA
gagccacaactgcggaaattcctagtaagtatcttcttgatgcagtttgcttctttgtccatcagctttctcttcctggggaacatcagctccccgagatcagggacttc

SEQ ID NO: 71285 - DNA, 110 bp, synthetic construct
  source 1..110: mol_type = other DNA
gccggcctcactcgtgagctcactcacttagcaggcagcgagctcgtgtgctgagtgtcagcgtccctttcctccctgtccttggtgcctccctccaccttcatgtttta

SEQ ID NO: 71286 - DNA, 110 bp, synthetic construct
  source 1..110: mol_type = other DNA
tgtcagcgtccctttcctccctgtccttggtgcctccctccaccttcatgttttacaagactgtcaaagtctgaaagcttcagccgtttcaatatttttttgacttagga

SEQ ID NO: 71287 - DNA, 110 bp, synthetic construct
  source 1..110: mol_type = other DNA
ttatgctaagatgcggtatgtgtgtatttaccccatgagaacgtgtgttttcatgtcggcgtatgatgacctcatcattcgaacgcagagtgtaggacgcatcatgactt

SEQ ID NO: 71288 - DNA, 110 bp, synthetic construct
  source 1..110: mol_type = other DNA
gagacaaaaatccggaaagaaccactgcaagggggttatcggcaccccgtccaaggcattctgtccaccccgaccatcccggccaggcgccaacctcagcctccaaactg

SEQ ID NO: 71289 - DNA, 110 bp, synthetic construct
  source 1..110: mol_type = other DNA
tgcagggtctgtcttttctttggaggaggtgagtgttgggctccgaaccgctggactcctacacacggacgcagcgggcccccggcccttcgtaggctctctcccgccct

SEQ ID NO: 71290 - DNA, 110 bp, synthetic construct
  source 1..110: mol_type = other DNA
ctcctacacacggacgcagcgggcccccggcccttcgtaggctctctcccgccctctgcagcacgtgtctcaccagagcccctggtgcattgtcctctggctcatccagt

SEQ ID NO: 71291 - DNA, 110 bp, synthetic construct
  source 1..110: mol_type = other DNA
gcgtgtcaagccgagagctcagctggcccaaggggtagagctgggcccatggatcctcctggttcttggactgctgttcctgggtcggttttttactgattgaatttact

SEQ ID NO: 71292 - DNA, 110 bp, synthetic construct
  source 1..110: mol_type = other DNA
atgctgctcttccgcatctgtggggctgtcactggcgccttcttgtcccctaaaggtcctggcatctgatcaaacactgtctgtgtttttgatcagttaataagtcagtc

SEQ ID NO: 71293 - DNA, 110 bp, synthetic construct
  source 1..110: mol_type = other DNA
agactggttcctttttctatttgcagtggccatgctttttgccttcccgatgcggacctcaagagatacctatctagctatctgtctgtctttgtcaattggtttctttg

SEQ ID NO: 71294 - DNA, 110 bp, synthetic construct
  source 1..110: mol_type = other DNA
gggaatgaggaggggtctttccagctccagagcacgattccgagacttttagacgctctccgttatgaagatatttccagggaaacacacacacccaagcagaaacctta

SEQ ID NO: 71295 - DNA, 110 bp, synthetic construct
  source 1..110: mol_type = other DNA
atgccaagcctgaacgcatcgctttccaggacgcctttgaagctgtgagcccacctgggggtccccgccaggcaggaaatatcgagatggaagaggaggatgctgggggt

SEQ ID NO: 71296 - DNA, 110 bp, synthetic construct
  source 1..110: mol_type = other DNA
tgggggtccccgccaggcaggaaatatcgagatggaagaggaggatgctgggggtgcccagggcggcaggacaccacggaccggagggaagcagacctagccaggtgctc

SEQ ID NO: 71297 - DNA, 110 bp, synthetic construct
  source 1..110: mol_type = other DNA
gggatctatgagtgggctcatcacaaaaaaattctttaaaaattggagttcccgttgtggctccacggaaacaaatctggccagtaaccatgaggacgcaggttcgaccc

SEQ ID NO: 71298 - DNA, 110 bp, synthetic construct
  source 1..110: mol_type = other DNA
gcccccctcgctcgcttcttgagcatcccaagagtcacgtggagggaacaaaaaaccggctgacatctccaacaactaagccattggtcgcctcgacgcagggctgggag

SEQ ID NO: 71299 - DNA, 110 bp, synthetic construct
  source 1..110: mol_type = other DNA
cccgggtcccagtccctgagagcccagacacagcagcccatgggagtgggcacgaggcccttctgccaagtccccagggtgtgttctcacagcgacagcatcccccaccc

SEQ ID NO: 71300 - DNA, 110 bp, synthetic construct
  source 1..110: mol_type = other DNA
cacacgctcacgtcccagccccagcacgcgtgtttggagacagggctttcacaaggtgagcgtgttagaattaggtcactgttactggtgtggggcccggaccggcgtcc

SEQ ID NO: 71301 - DNA, 110 bp, synthetic construct
  source 1..110: mol_type = other DNA
gtgagcgtgttagaattaggtcactgttactggtgtggggcccggaccggcgtcctcgtgcgaacgggacatgcgggcagaggcacacacagagggaggggggtgtgagc

SEQ ID NO: 71302 - DNA, 110 bp, synthetic construct
  source 1..110: mol_type = other DNA
acccgcccgtccacctggagaaggcctgcagccaagagccgctgtcttctgcttcactcccgggtctccccacccaccaaggatggtctcccacggcccacgtgctcctc

SEQ ID NO: 71303 - DNA, 110 bp, synthetic construct
  source 1..110: mol_type = other DNA
acccacgggctgctccccaatgtccccccttgcattcagctgtcctaaatctgctgtcagttaccacacggcttctgcttttacttcccaaaatgtgggtgctgtgcctt

SEQ ID NO: 71304 - DNA, 110 bp, synthetic construct
  source 1..110: mol_type = other DNA
gtcagttaccacacggcttctgcttttacttcccaaaatgtgggtgctgtgccttctcttctgctgttgtttttgtttaatcctcagagaaggatttctctctccctctc

SEQ ID NO: 71305 - DNA, 110 bp, synthetic construct
  source 1..110: mol_type = other DNA
gtgggaatggtttcagagagatggcagtgagtgatggcttgaagcgagatcccagttctctgctcaggaattgaacctgagctgtctgcatgaaaaccaggaaccctatc

SEQ ID NO: 71306 - DNA, 110 bp, synthetic construct
  source 1..110: mol_type = other DNA
ttctctgctcaggaattgaacctgagctgtctgcatgaaaaccaggaaccctatccactagactggccgaggccgaaagcagaattgccctgattcgtgttcccgttgaa

SEQ ID NO: 71307 - DNA, 110 bp, synthetic construct
  source 1..110: mol_type = other DNA
cagtgggctttggcagagaaaggcccagccctgtgccccttggtccctggacctcacaaaggcttgagtctgagtgtgcagagcacccagccggcccccaggaccgcaga

SEQ ID NO: 71308 - DNA, 110 bp, synthetic construct
  source 1..110: mol_type = other DNA
acaaaggcttgagtctgagtgtgcagagcacccagccggcccccaggaccgcagactgcagggttggccctcaccattgccgcggaggggggtcctgggccaagttgttg

SEQ ID NO: 71309 - DNA, 110 bp, synthetic construct
  source 1..110: mol_type = other DNA
ggggggccaaaagcagagggagtccctggccggctgcgtgagcgggtctgaagccacacctcctttgccatttctgattctggccgttgctgaggctcttacggtattct

SEQ ID NO: 71310 - DNA, 110 bp, synthetic construct
  source 1..110: mol_type = other DNA
ttttcttagaggaatcctgcccaggtatgtacacaacgcaaggggcaggtggcaggaggcccactgcacatgctcagcctaaagatgacagcgcttcccactatgggcgc

SEQ ID NO: 71311 - DNA, 110 bp, synthetic construct
  source 1..110: mol_type = other DNA
aagtaactccttcccctggagcagcacaggagccatggagttggcctgttggaggcagttctgtggtttagtttacctggtcataggccgcacaccgtagcagtgcccaa

SEQ ID NO: 71312 - DNA, 110 bp, synthetic construct
  source 1..110: mol_type = other DNA
cagttctgtggtttagtttacctggtcataggccgcacaccgtagcagtgcccaacaccagctgggtcccattgcccggcggcggggtggcttgcccagttgggcagctt

SEQ ID NO: 71313 - DNA, 110 bp, synthetic construct
  source 1..110: mol_type = other DNA
ttcaaaaaattccagagttggagtttctgttgtggctcagcaggttaagaacaagacacagtatcttttgggatgtaggtttgacgacacagtatttgttgggatgtggg

SEQ ID NO: 71314 - DNA, 110 bp, synthetic construct
  source 1..110: mol_type = other DNA
gaaagggataagcagaagctttatcttgtttgcactgtttcttcctggcctgtgagcttgtcatctcctgtgaggaggaggctgggatgcttgatcagaatttctcttcc

SEQ ID NO: 71315 - DNA, 110 bp, synthetic construct
  source 1..110: mol_type = other DNA
gtgaacctgagtcttgagttatttccctttgctacaaggggtcttaatcagcttgggcctgccacagcaaaataccataaaatggtagcccggagttccccatgtgacgc

SEQ ID NO: 71316 - DNA, 110 bp, synthetic construct
  source 1..110: mol_type = other DNA
ggaaatatgactaatgggactggaaatcctgaatgatttctaactgtatatggggctgagatgggactaagatgaattgaacagcagttccttattcatgtagtcatgtc

SEQ ID NO: 71317 - DNA, 110 bp, synthetic construct
  source 1..110: mol_type = other DNA
cagattactttccctaaggtgggtgggcctcatccaatcagtcaaagtcatgagtagaacacaagactgtcctccccagagaagagagacttctgccagcagacagcttt

SEQ ID NO: 71318 - DNA, 110 bp, synthetic construct
  source 1..110: mol_type = other DNA
agaacacaagactgtcctccccagagaagagagacttctgccagcagacagcttttgaacttgaattgtattgctctgctctgggtctccagctggctgcccaccctgca

SEQ ID NO: 71319 - DNA, 110 bp, synthetic construct
  source 1..110: mol_type = other DNA
tagggaatttctctgaacttggcaaatctggtttccaggtggggaaggaaaagcgggagcaggtgtcgccttggccccaccccaaagctctcattatcaccctcccgtcc

SEQ ID NO: 71320 - DNA, 110 bp, synthetic construct
  source 1..110: mol_type = other DNA
ggagaaatgacaacaggccacaggttcttctcctcagctccacatccagaaacaggttaaacactgaaagttctaatgtaactctgatgcaggcaaaacttaacctgaac

SEQ ID NO: 71321 - DNA, 110 bp, synthetic construct
  source 1..110: mol_type = other DNA
gctcctcttgtaggtttataaacacttgagtatcccaaggttcaacaccagctgtcttctctgtgtagacctgattcagtggttacaggcaggcccactgtcatccatgt

SEQ ID NO: 71322 - DNA, 110 bp, synthetic construct
  source 1..110: mol_type = other DNA
tttttggcacaggtcaaaaggaaattttttccccctaagctttctccatggttttagtttcattgagtaaattgtgtcagttaaacaaatacactttagccagcagctgg

SEQ ID NO: 71323 - DNA, 110 bp, synthetic construct
  source 1..110: mol_type = other DNA
agtttcattgagtaaattgtgtcagttaaacaaatacactttagccagcagctgggctggtgtttcagttctatgtcttgttggggttgggtagcctggtcttttaactg

SEQ ID NO: 71324 - DNA, 110 bp, synthetic construct
  source 1..110: mol_type = other DNA
tgtctgatgtcttctagaaagcttctcctcatccatcagcccttattgatctttcactcctctggcccctacagtggctatcacttctgaatcgcttgtgttggcctttg

SEQ ID NO: 71325 - DNA, 110 bp, synthetic construct
  source 1..110: mol_type = other DNA
gctgaaacctgcccggagaagaagagctggctgggtgagtgcttcttcccttgacccaccctccccccgtggtagctgatgcgcacaccctccctccaagtcaaggctct

SEQ ID NO: 71326 - DNA, 110 bp, synthetic construct
  source 1..110: mol_type = other DNA
ccaccctccccccgtggtagctgatgcgcacaccctccctccaagtcaaggctctgagcatcctccaggcattcaccggtgccgcacttctcctgattgactttgctttt

SEQ ID NO: 71327 - DNA, 110 bp, synthetic construct
  source 1..110: mol_type = other DNA
gatgatggaagactatgtttttcctcatcaagtttgcccacaaactgaaaggacttctaatgcaagggaacgagtggcctgagataggtcttcaaagtccaccctgcggt

SEQ ID NO: 71328 - DNA, 110 bp, synthetic construct
  source 1..110: mol_type = other DNA
gcagcctctataagctggaaaaggcaaggaaatggattctgaagggagggggcgcatccaggaccaacacttcgatttcagctcagggaaagccagtttggactcttgac

SEQ ID NO: 71329 - DNA, 110 bp, synthetic construct
  source 1..110: mol_type = other DNA
atccaggaccaacacttcgatttcagctcagggaaagccagtttggactcttgacctctagaactgtaagatcatgaatttgtgtttttttcagccactacatttgttgt

SEQ ID NO: 71330 - DNA, 110 bp, synthetic construct
  source 1..110: mol_type = other DNA
cagtggttttactggcaagatgcagtgagtggtgtagttcaaacagactgtgagtggcaacatgccagtctaactcatttgtatcatagcacattttagcttgtgtatat

SEQ ID NO: 71331 - DNA, 110 bp, synthetic construct
  source 1..110: mol_type = other DNA
gaagtgggctccaggtaacagggccctgtgtggcctgggacctcatgaagaccttctgagagaacgcagggtttggggttttcagagagtctcttttcagattctcagct

SEQ ID NO: 71332 - DNA, 110 bp, synthetic construct
  source 1..110: mol_type = other DNA
atgatatgccatcttcccatgaagaacttcccatgctgttttagagaacgcaatgccaagaggctcttctctttaaaatgctctcagtgagcatgcccagtgcttcaggc

SEQ ID NO: 71333 - DNA, 110 bp, synthetic construct
  source 1..110: mol_type = other DNA
acagactccgtgggcgagctgggaggcactgcacatgctcccccgtgtgtgcgtgggaactacactcatttattcttagactggagggattctaggagcactttagggga

SEQ ID NO: 71334 - DNA, 110 bp, synthetic construct
  source 1..110: mol_type = other DNA
aatcttcatggttgacagtgacagtgctgtgcattcctgtgagaaacgaagtggatggggagctcaggaccagctaccacccactaaagatgagacaagttcctctgctt

SEQ ID NO: 71335 - DNA, 110 bp, synthetic construct
  source 1..110: mol_type = other DNA
tggggagctcaggaccagctaccacccactaaagatgagacaagttcctctgctttgtacagccaagtttctcagtaaattaaagaacagggcaaggagtttgagcctaa

SEQ ID NO: 71336 - DNA, 110 bp, synthetic construct
  source 1..110: mol_type = other DNA
aaatcacagagctagaaagtgggagagcagccagggttcaaaggcaggcagcctgtgctctcagctcagtggtatgctgtctgctgacatctagtaacaaataaggctct

SEQ ID NO: 71337 - DNA, 110 bp, synthetic construct
  source 1..110: mol_type = other DNA
tgctctcagctcagtggtatgctgtctgctgacatctagtaacaaataaggctctttctcaaaaatttggaatgatttatgatgaaggaaggagaaaaaaataattcaaa

SEQ ID NO: 71338 - DNA, 110 bp, synthetic construct
  source 1..110: mol_type = other DNA
cccaccctagcctcctgcagaacatttgagggaatggtttacatccaagcttctttttctaggacaattttatttcacctcaatgagattctgtttggattttgcactgc

SEQ ID NO: 71339 - DNA, 110 bp, synthetic construct
  source 1..110: mol_type = other DNA
tttctaggacaattttatttcacctcaatgagattctgtttggattttgcactgcctgtggagatggaatctagagaaaagagctgcagaaaatcaaacgtctctctcat

SEQ ID NO: 71340 - DNA, 110 bp, synthetic construct
  source 1..110: mol_type = other DNA
gaaagcatagaaatgcaaatgtcatataagagctaacttaatagtgatttgtttccttggttccacacctccctgaccccattccttcattcttcaatgattatttacca

SEQ ID NO: 71341 - DNA, 110 bp, synthetic construct
  source 1..110: mol_type = other DNA
atgctcttcaactgatccagcgtctcaatcagacttagatttcattgaaagacagaaactttcagccctgctttcatgcgcaccatgatggcaggaagccagcccagtag

SEQ ID NO: 71342 - DNA, 110 bp, synthetic construct
  source 1..110: mol_type = other DNA
aaactttcagccctgctttcatgcgcaccatgatggcaggaagccagcccagtagctcaggcttaatggatttcctataataaaccctgaacatcagagaggcacaaacc

SEQ ID NO: 71343 - DNA, 110 bp, synthetic construct
  source 1..110: mol_type = other DNA
gggccagtgccaggacatgagggcccaccaatctggttgagagcccactggaattatccctaccagccagtcctaagctgtttactctgtcctgccctgtctttcccaca

SEQ ID NO: 71344 - DNA, 110 bp, synthetic construct
  source 1..110: mol_type = other DNA
atccctaccagccagtcctaagctgtttactctgtcctgccctgtctttcccacagaaaccccattaaaggccatggcctgagtgccacccttgtccttccatcttctgc

SEQ ID NO: 71345 - DNA, 110 bp, synthetic construct
  source 1..110: mol_type = other DNA
tcctgggtggcccagaggtggcaagtcaagcctcctgtctgatgttcctaacccttctaccccaacacccagcagggtgatcatcatgaaacagatgctcaacaaatact

SEQ ID NO: 71346 - DNA, 110 bp, synthetic construct
  source 1..110: mol_type = other DNA
acctgcatatcccctggaatctcacatcttaggaaacggactccctatttcctaccactcaggggaaaaacaatgaagttgtctttacctccttcttatttctaaaactc

SEQ ID NO: 71347 - DNA, 110 bp, synthetic construct
  source 1..110: mol_type = other DNA
agtccctaatgctaaaatctaataactttgttaaaaacctaaattgacgttagcttcataaaaatagggtggtctttagtggcgctttctttcagtgtgttgaccaatat

SEQ ID NO: 71348 - DNA, 110 bp, synthetic construct
  source 1..110: mol_type = other DNA
tcataaaaatagggtggtctttagtggcgctttctttcagtgtgttgaccaatattttgattaatattttcctgattttttcctctaaaagataaatttcaggcatacta

SEQ ID NO: 71349 - DNA, 110 bp, synthetic construct
  source 1..110: mol_type = other DNA
aaactcatgagaactgcatgaccaaagattcagctcaaatacatacatatatatgcatatgcatttgaattttcattccatagaatatgatgaattctcaggtcttcatt

SEQ ID NO: 71350 - DNA, 110 bp, synthetic construct
  source 1..110: mol_type = other DNA
gctggtcccaaggctttggcgtgagggtttccatgactaactccgcagagctagtatactcaactagaccccaaagatagtacagcatccatcatctggagtcatggggg

SEQ ID NO: 71351 - DNA, 110 bp, synthetic construct
  source 1..110: mol_type = other DNA
taaggatctggcgttgccccaagctgcagattgtagttcagatcagatcccatgtactagggctgtggtttaggctggcagctgcagttccaatctgaccccgagcctgg

SEQ ID NO: 71352 - DNA, 110 bp, synthetic construct
  source 1..110: mol_type = other DNA
tgcagtttgatcattcataactgatttctgaagtaagagaaggctagctgatatgtttgctgacagaggtgtgcatttatcaaggttccaagctttagacttttgcattc

SEQ ID NO: 71353 - DNA, 110 bp, synthetic construct
  source 1..110: mol_type = other DNA
tcattagcacgtctgtgttctgattctgatgcctccatgttggtttaaggcaatagggcaaatcaggaccccagagggagccttgatgaagaagctcaggaaattcacag

SEQ ID NO: 71354 - DNA, 110 bp, synthetic construct
  source 1..110: mol_type = other DNA
gggcaaatcaggaccccagagggagccttgatgaagaagctcaggaaattcacaggcagtgagggcatccttcatttttaatttgttggtttaatgtcgctggaggggaa

SEQ ID NO: 71355 - DNA, 110 bp, synthetic construct
  source 1..110: mol_type = other DNA
gaaagtgaataatagcaacagcagaactattactaacagcagaaccaaactggggcatttttttgaagagaaaggctagagggaagggtttttaatagttatcctggaca

SEQ ID NO: 71356 - DNA, 110 bp, synthetic construct
  source 1..110: mol_type = other DNA
tcacccatctgtatttgcccagcaaagtagaggtgtgattatcaaagctgtgcggctcccacagggataattttctgagccactaatcagacttctgtgagctgaagttt

SEQ ID NO: 71357 - DNA, 110 bp, synthetic construct
  source 1..110: mol_type = other DNA
agaggggaaggtcgctctagaacctgtgctccagggaagaacccccactccttgcaatacacagcgactgtcaggccatctatgcctgcccaaagcagaaaccacacaag

SEQ ID NO: 71358 - DNA, 110 bp, synthetic construct
  source 1..110: mol_type = other DNA
aatacacagcgactgtcaggccatctatgcctgcccaaagcagaaaccacacaagccctgcccctggacaccaagagggcctaataacacaatttgaaaatcaccattac

SEQ ID NO: 71359 - DNA, 110 bp, synthetic construct
  source 1..110: mol_type = other DNA
cttgataattctcgagcaatttattgaatctacctaagactctacttcctcatcatcattctaccaaaggataatagctcctatcttaaagagttgttctgaagcttgag

SEQ ID NO: 71360 - DNA, 110 bp, synthetic construct
  source 1..110: mol_type = other DNA
gtcttagcctgaggaatgggtatgaaccaaggagctgcaactggccagttcgtagaagtgggctattagcaagagggatttgttcatgaccctaaataaaagacctcctt

SEQ ID NO: 71361 - DNA, 110 bp, synthetic construct
  source 1..110: mol_type = other DNA
aaaacaaaattttgcaatagaaatttaaaaagtctcttcaaccaatatgattgctgtccatctccaggatgccaggacgtcctggcatctctaggtttctatctttagag

SEQ ID NO: 71362 - DNA, 110 bp, synthetic construct
  source 1..110: mol_type = other DNA
gatttggccctgaggctgcagtcttcagatccctaagatgaaacacactgcaagtggaggatttcctgctcccaggactggtccactccctttctaatcagaagcccctt

SEQ ID NO: 71363 - DNA, 110 bp, synthetic construct
  source 1..110: mol_type = other DNA
tgggagttccctctgtggcacagtgggttaagaatctgacagcagcagctcagattgctatggctgcaagagttcaatctcaggcctagcagagtgggttgaaggatctg

SEQ ID NO: 71364 - DNA, 110 bp, synthetic construct
  source 1..110: mol_type = other DNA
aatgtcccagggggccgcactccccttagcacagcctctaaagacttaccatccatctcctgcattgtatccatgcaagaggcggaacaacagcatctaggctcataagc

SEQ ID NO: 71365 - DNA, 110 bp, synthetic construct
  source 1..110: mol_type = other DNA
tctcctgcattgtatccatgcaagaggcggaacaacagcatctaggctcataagcaaaaacaactgatcttcccaaatagtctgcttaaccgtatttccagcaaatgtgc

SEQ ID NO: 71366 - DNA, 110 bp, synthetic construct
  source 1..110: mol_type = other DNA
cttgaaagagttaagcacaaaccccaagaagggatttcaggtggatggaatcatttgataagggcttattacttatcctgcttagatgcttagcaaagcttacctggata

SEQ ID NO: 71367 - DNA, 110 bp, synthetic construct
  source 1..110: mol_type = other DNA
caatgctggctctaaagcttacttcttaaaagcagtgttctgactctattacccttactcacactggaattaactaccaaatgatttcattacgtattacatagcattgg

SEQ ID NO: 71368 - DNA, 110 bp, synthetic construct
  source 1..110: mol_type = other DNA
tactcacactggaattaactaccaaatgatttcattacgtattacatagcattgggatgcttttgaatccttagagaatatgaatgtatagatcgtgcctttgtaatgac

SEQ ID NO: 71369 - DNA, 110 bp, synthetic construct
  source 1..110: mol_type = other DNA
cagggcagcgaatggaaggtgagctatgtcacgtcagctcccaggaccagcatgtggacagagacgtaccctgcatatttatcttcagaggttaactgggtcacaaggag

SEQ ID NO: 71370 - DNA, 110 bp, synthetic construct
  source 1..110: mol_type = other DNA
aaaaaagacaaaaaaaaaaaaattccctctaagcaatggggatatactgaacactacgccttaaaataagaattcataaatgaggggtaaactaataaaacatggcaaag

SEQ ID NO: 71371 - DNA, 110 bp, synthetic construct
  source 1..110: mol_type = other DNA
gataatgattaataattatgtgaaatgttaatggctcaaacactccgtataaaaggcagagattgacagtgaataacaaggacgatcctaatgtatgatgcctaagatgc

SEQ ID NO: 71372 - DNA, 110 bp, synthetic construct
  source 1..110: mol_type = other DNA
gcagagattgacagtgaataacaaggacgatcctaatgtatgatgcctaagatgctaaatacaaagacagaactatattgaaagtaaaggatgaaaaaagacctaccaca

SEQ ID NO: 71373 - DNA, 110 bp, synthetic construct
  source 1..110: mol_type = other DNA
tccagaggctactttttctctttcctatgtctggcattgaacttttatttttttggggaaaaaatgtctgttctatctttttatcaatcaggactaagatgagactttaa

SEQ ID NO: 71374 - DNA, 110 bp, synthetic construct
  source 1..110: mol_type = other DNA
ctgacacacattagcaggcagtttctttctcctgatttaaggtagatttttagccacatgagagaatgagaaagtttcacccctgaggctcacttcgcaagcctggatta

SEQ ID NO: 71375 - DNA, 110 bp, synthetic construct
  source 1..110: mol_type = other DNA
acatgagagaatgagaaagtttcacccctgaggctcacttcgcaagcctggattataagagcctggaaaccccagctttttgtaccaagcatctaccccaagaacacgca

SEQ ID NO: 71376 - DNA, 110 bp, synthetic construct
  source 1..110: mol_type = other DNA
ggtcttgggtcagactgccttagttaatatatctgttccattacttaatagctgttttcccacaagcaagttacaaatgttaattaatcctcatttttctcatacaatgc

SEQ ID NO: 71377 - DNA, 110 bp, synthetic construct
  source 1..110: mol_type = other DNA
agttttaactaacacttttctgcctttgccttaaatgaagcaaatgcaagctatagtcagggaggagtcttaagaaagagatagagcataatgagaatggggttcacttc

SEQ ID NO: 71378 - DNA, 110 bp, synthetic construct
  source 1..110: mol_type = other DNA
ttgcccaggaaaacattaaagcaatttaataagaaaaaaattcactttttgtttcaggaaattcttgccattaactgggccacagctatcagttctctggaccaatcacg

SEQ ID NO: 71379 - DNA, 110 bp, synthetic construct
  source 1..110: mol_type = other DNA
aggaaattcttgccattaactgggccacagctatcagttctctggaccaatcacgctcatatgaaattaatagaatattttaatagattgttcacctgggtaaacagctc

SEQ ID NO: 71380 - DNA, 110 bp, synthetic construct
  source 1..110: mol_type = other DNA
ctgtttctcttctgttctgacttgatttagtattctttttactgtaacagtctgcctctttccctcgcccactgtactcaatctcgtaaagtttattaagaaaaatattc

SEQ ID NO: 71381 - DNA, 110 bp, synthetic construct
  source 1..110: mol_type = other DNA
ctctttccctcgcccactgtactcaatctcgtaaagtttattaagaaaaatattcaatttaacaaatacacattggaaatatacataatcaatagacaagtcagggttat

SEQ ID NO: 71382 - DNA, 110 bp, synthetic construct
  source 1..110: mol_type = other DNA
tatcatttcgctatgcttctattgatgaccaatagctcttataattcagagctgtttttgggaatgtgacaggtgttcaataaacttatgttcaccaagcctgctactga

SEQ ID NO: 71383 - DNA, 110 bp, synthetic construct
  source 1..110: mol_type = other DNA
aaatccatctttttattgatttcagatgccaaccattcatatctatatttatacggaattttattgatcagtctgtctgttcactgttgttactaacatgcttagttgcc

SEQ ID NO: 71384 - DNA, 110 bp, synthetic construct
  source 1..110: mol_type = other DNA
aagttttgtttaactagaaaactctataaactttactatttcttcaaggctttgtcatctacaaccttccttaactatccccaccctgactttctattctagaaactttg

SEQ ID NO: 71385 - DNA, 110 bp, synthetic construct
  source 1..110: mol_type = other DNA
gcttcagcagccaaggagatgctcataaaaaggtccatatggaaaggagctgcatcattcagcctcctgccattatttgatctggtcgtcccagtacaatactgaattgc

SEQ ID NO: 71386 - DNA, 110 bp, synthetic construct
  source 1..110: mol_type = other DNA
atgtaaatatatctgactgagcaaaaaatgtttgcaaagccttcaaggcagaatcagtacctgttgatagttacaccaaggagacctatcagaggctgtttaatgaacag

SEQ ID NO: 71387 - DNA, 110 bp, synthetic construct
  source 1..110: mol_type = other DNA
ttgtcagtcatgccttaataaagctagagaaaatttttaaaaagaaggtaagagaaggtcatcttctgaaaagcactatggttgcagccactatggagaacagtgtagag

SEQ ID NO: 71388 - DNA, 110 bp, synthetic construct
  source 1..110: mol_type = other DNA
ttttagggctctacattcatgaccacagcatctcccaaatgccccatttcatatcactgtcaacttgagggttacagtttcaccatatgacctttagggtgacacaaaca

SEQ ID NO: 71389 - DNA, 110 bp, synthetic construct
  source 1..110: mol_type = other DNA
tcttctggggatatgtatggattaatactgttagcacaaattattcttatacatgaacactagtagctacagttaaggaacataagacttctctaactgtcaaggacata

SEQ ID NO: 71390 - DNA, 110 bp, synthetic construct
  source 1..110: mol_type = other DNA
ataaataagacaaaaggcaaaggaagcagaagatcctttcatctggcttctggcagtaccaccagcattgtcacaagctgtgcctccacattgccacctgcagtgtcact

SEQ ID NO: 71391 - DNA, 110 bp, synthetic construct
  source 1..110: mol_type = other DNA
gtaccaccagcattgtcacaagctgtgcctccacattgccacctgcagtgtcacttgcagtgcctctagtagcaaaggtggcaacagcagaggatgtagcttgccagtgt

SEQ ID NO: 71392 - DNA, 110 bp, synthetic construct
  source 1..110: mol_type = other DNA
gggcagtcagtttgaaatatctcattgtgtcttagatactgacaacccaggaacagatattttttggccagaagtaatgagctcacacttcatgctctaatatatcctaa

SEQ ID NO: 71393 - DNA, 110 bp, synthetic construct
  source 1..110: mol_type = other DNA
ggtgtgggtgttcgtgctttggctaagaatacaactgcagcagctaggttgctgcagaggcatgggttcaattaccagccctgtggagtgagttaaaatatctacattgc

SEQ ID NO: 71394 - DNA, 110 bp, synthetic construct
  source 1..110: mol_type = other DNA
gattctaatagaattcgtgcctgctgagccatagcagaactccctgcattaactttgtgacctggagcaaggtgctcaattttctgagcctccatgttttcatttctaat

SEQ ID NO: 71395 - DNA, 110 bp, synthetic construct; identical to SEQ ID NO: 71394
  source 1..110: mol_type = other DNA

SEQ ID NO: 71396 - DNA, 110 bp, synthetic construct
  source 1..110: mol_type = other DNA
aaggagaacctatagtggaaagatactgcagtcttaaccaattatgggtaaagtatcttacttttggaaattttgcacccaagccatgtggacacattgtaggacctgtc

SEQ ID NO: 71397 - DNA, 110 bp, synthetic construct
  source 1..110: mol_type = other DNA
tcttacttttggaaattttgcacccaagccatgtggacacattgtaggacctgtcccagggccttaggaaagagcaggcttactataaagctagtttttccatggcttag

SEQ ID NO: 71398 - DNA, 110 bp, synthetic construct
  source 1..110: mol_type = other DNA
tcgttgcaaagtaccatattgtccagagcccagcctttgttggcccgagttatttcctactcagggcaagagcagaggcaaacatgaaattagcaactagagatttgtct

SEQ ID NO: 71399 - DNA, 110 bp, synthetic construct
  source 1..110: mol_type = other DNA
tgtccatcacacatgaatggcagggaacctggatcaacacggcaggctgcccatgggccaggagctccctgccgcaagctcgtcatcagattggacttcaagtgggacac

SEQ ID NO: 71400 - DNA, 110 bp, synthetic construct
  source 1..110: mol_type = other DNA
agcttttacagcacccctgagactctctgcccttgcagagtcacccttcagagtaaccctggcatttgcctaatggtccacttaagtctggtgagtaaggctttacaagc

SEQ ID NO: 71401 - DNA, 110 bp, synthetic construct
  source 1..110: mol_type = other DNA
caccacatccgccctcctgctggaagtggtagaggtgtggacagggcatggtgcatagagcacaactctacgtgtagcgggtagtctgcttgaggggaggagactaaggc

SEQ ID NO: 71402 - DNA, 110 bp, synthetic construct
  source 1..110: mol_type = other DNA
tagagcacaactctacgtgtagcgggtagtctgcttgaggggaggagactaaggcaggcccctgtgaccaaatctgggtaggaaggagcccgctctgcgggccccacgat

SEQ ID NO: 71403 - DNA, 110 bp, synthetic construct
  source 1..110: mol_type = other DNA
ctcagaataggcgtggacgtgcttccagaaggtggacgttcaagctgctgcgagtaaaaaccacatgaagcttggtgtctgcgccctcttcattcaaatttcattctgga

SEQ ID NO: 71404 - DNA, 110 bp, synthetic construct
  source 1..110: mol_type = other DNA
aaaaaccacatgaagcttggtgtctgcgccctcttcattcaaatttcattctggagatggttccacctatctccagtctgtcccagggaccaaagtctcttccatcctaa

SEQ ID NO: 71405 - DNA, 110 bp, synthetic construct
  source 1..110: mol_type = other DNA
cccgggcagctgctgagagaccccatgctcagaaggaggccccacagggtctcgaatcaaatgccctgaagggctgggcagtatcttataagaatgcagcacattggttg

SEQ ID NO: 71406 - DNA, 110 bp, synthetic construct
  source 1..110: mol_type = other DNA
ccactccttgtgctggaaaaggagccgtacacacagcccctcccccaccctgagcttggggacagagatgtggacccaggttggtaagaggaacacctgttcataccaac

SEQ ID NO: 71407 - DNA, 110 bp, synthetic construct
  source 1..110: mol_type = other DNA
ttggggacagagatgtggacccaggttggtaagaggaacacctgttcataccaacaaacccatctgcacacaagtgaccccataacagtgcccggcgtccaactcatgaa

SEQ ID NO: 71408 - DNA, 110 bp, synthetic construct
  source 1..110: mol_type = other DNA
gcacccttaggagctgcgaatatccagccagtgcctacagacattcctcaccacacagcaagcagctcatggtttctgagatagatacaggaactcagaggagtaagacc

SEQ ID NO: 71409 - DNA, 110 bp, synthetic construct
  source 1..110: mol_type = other DNA
gaaaacccctggggtatttgccaggaatgggaaagaactgtagctgtgtcagaaggagaagcctttgtttagtagtcagacgactgagtgggaaggatgtctgatgataa

SEQ ID NO: 71410 - DNA, 110 bp, synthetic construct
  source 1..110: mol_type = other DNA
gagaagcctttgtttagtagtcagacgactgagtgggaaggatgtctgatgataaaggctatgacctctgctttcttttgccctctgtttttgctgggctgcccactggt

SEQ ID NO: 71411 - DNA, 110 bp, synthetic construct
  source 1..110: mol_type = other DNA
tatttttcatcacaggctttcccaatcctactcagtcgctgctttgaagacccatcttaaacactcggtccaaaactcaaaatgttattaataaaaaaccccttccctaa

SEQ ID NO: 71412 - DNA, 110 bp, synthetic construct
  source 1..110: mol_type = other DNA
cttaaacactcggtccaaaactcaaaatgttattaataaaaaaccccttccctaacttcctccttttaaaatgaggtgatgatctcctttgctgcaggaagtttagtgaa

SEQ ID NO: 71413 - DNA, 110 bp, synthetic construct
  source 1..110: mol_type = other DNA
attcacattttctgtcctcaacttctttttttttggggggggggtccctaatgacatatggaagttccctggccagatatcaaatctaaactgcagctgtgacttatgcc

SEQ ID NO: 71414 - DNA, 110 bp, synthetic construct
  source 1..110: mol_type = other DNA
caaggctcatggaactcccatgtctacagcagtggcttcaaagctcttttgacactgcatacaatccgtagagaaaaaaaaaaattaaggtgtcctctaaataatacaca

SEQ ID NO: 71415 - DNA, 110 bp, synthetic construct
  source 1..110: mol_type = other DNA
gccagattctaaactgttaggccaccagggaacttctgttgcatcaatttgctgttcactactctttgttcagctttattacagtctacttggtaccttcctgggtcctg

SEQ ID NO: 71416 - DNA, 110 bp, synthetic construct
  source 1..110: mol_type = other DNA
ttcccctgtgccacgatgggaattcccggatgggttgacttttattcaagggattgaaaagtatttcaccaaggaatgtaattgataaacaataataacaatgataacaa

SEQ ID NO: 71417 - DNA, 110 bp, synthetic construct
  source 1..110: mol_type = other DNA
gtaactgagatctctgttgcactgtatctggtcagtattatccatccaagagttcatatatatggagtattttgatacaaagaaaaataaatttgggtttatttctttgt

SEQ ID NO: 71418 - DNA, 110 bp, synthetic construct; identical to SEQ ID NO: 71417
  source 1..110: mol_type = other DNA

SEQ ID NO: 71419 - DNA, 110 bp, synthetic construct
  source 1..110: mol_type = other DNA
catgctaaggctggatccatgctgctaaaatgctacatcgccaagtcctgtctactggggagcactagcttcatcccatttaaaacagagcttttcttaaaagagatact

SEQ ID NO: 71420 - DNA, 110 bp, synthetic construct
  source 1..110: mol_type = other DNA
catggacctcttaacaacatgaattctttcaattcatgagcacagagtatctttccatttctttgtgtcctcttcaatttttctcactaatgtcttatagttttcagtgt

SEQ ID NO: 71421 - DNA, 110 bp, synthetic construct
  source 1..110: mol_type = other DNA
ctttcaattcatgagcacagagtatctttccatttctttgtgtcctcttcaatttttctcactaatgtcttatagttttcagtgtgcagatctttcatgtctttggttaa

SEQ ID NO: 71422 - DNA, 110 bp, synthetic construct
  source 1..110: mol_type = other DNA
tagaatgctattattggttatgagaaaatatttaatataaggcagtcatagatggtagttctgacagaggcctgtgacccaggaacaacaaatcaaaaaccggaaaacaa

SEQ ID NO: 71423 - DNA, 110 bp, synthetic construct
  source 1..110: mol_type = other DNA
aaacatcttctcagtctgctggctttccaaattcagacacaatagtcctataactgtatcctagacgggcttgctgtgagctgtaccccaaaaggatatggccttcctgc

SEQ ID NO: 71424 - DNA, 110 bp, synthetic construct
  source 1..110: mol_type = other DNA
attgaaattagtttgatacttgctaaagaaaagcaatttgaataagagctcaccctactgtgttaggtaatagtacaatataaatgcagaggatgatgatgtgtagaaag

SEQ ID NO: 71425 - DNA, 110 bp, synthetic construct
  source 1..110: mol_type = other DNA
tactgtgttaggtaatagtacaatataaatgcagaggatgatgatgtgtagaaaggcccagtaaatatccggggcggtgtttcattactggttctctctctctaagctgg

SEQ ID NO: 71426 - DNA, 110 bp, synthetic construct
  source 1..110: mol_type = other DNA
gtcccaaatcacacttgtttgctttcccaagtagactacagctgctggtaaaataactggcccttttggttttgttcaggtgcagatacttggtgatcaaaagcaggatt

SEQ ID NO: 71427 - DNA, 110 bp, synthetic construct
  source 1..110: mol_type = other DNA
actggcccttttggttttgttcaggtgcagatacttggtgatcaaaagcaggatttgaaggatatgaatccctgaggaattaatgatcctctaaacaatgtgaggttccc

SEQ ID NO: 71428 - DNA, 110 bp, synthetic construct
  source 1..110: mol_type = other DNA
cgtcaacactatgtcaccagtgctggatattcattccccatttaaacttggagaaaggatctcatcttggcataattttaataccattaattatacataaggctagaatc

SEQ ID NO: 71429 - DNA, 110 bp, synthetic construct
  source 1..110: mol_type = other DNA
tggatccaaggagaaaacatcaagatagataacaatgacatccaggagaaatattggaaccaaataaaaatatttgaataaggatggagtataaattccatgagatgaaa

SEQ ID NO: 71430 - DNA, 110 bp, synthetic construct
  source 1..110: mol_type = other DNA
gggctgcaggcatgcaacccatgtatgtgggctgccaggaagagggctgactcaatggccaggtcactgcagagggcccctgctagggcaatgtcacaaccttgacccca

SEQ ID NO: 71431 - DNA, 110 bp, synthetic construct
  source 1..110: mol_type = other DNA
gcaagtagaatacttcaatttacctgtgtcacttctcccacaaagtagcaccttccagtgccaggagagagcttctcaggtagtgatttttcccatgaggacaggtgagc

SEQ ID NO: 71432 - DNA, 110 bp, synthetic construct
  source 1..110: mol_type = other DNA
cagtgccaggagagagcttctcaggtagtgatttttcccatgaggacaggtgagcgcatgtaggtgagttcccccagccattcaggatgctccatacagacccataactt

SEQ ID NO: 71433 - DNA, 110 bp, synthetic construct
  source 1..110: mol_type = other DNA
ccctcggggttttggcagggggagaggaaagaaacctttctgacatatatcagggtacatctgttctttaacaagctggttcctctggtgaaactagttaaccagagcct

SEQ ID NO: 71434 - DNA, 110 bp, synthetic construct
  source 1..110: mol_type = other DNA
gtgaccgaatgaataaatcaaatagaaaggcagtgcagaccagcagaaaacagagctgcagaaacaagcagggaggagatccatcatgataaggatgtaacgttaaagga

SEQ ID NO: 71435 - DNA, 110 bp, synthetic construct
  source 1..110: mol_type = other DNA
caagaatatgtaaagaatgcttataattcaacaacacacaacaaaatatcaaacaacctaattaaagaatgaatgagaagttccctctctggctcagcagttactgaacc

SEQ ID NO: 71436 - DNA, 110 bp, synthetic construct
  source 1..110: mol_type = other DNA
agaaatctgactgaacattctaccctaagatttactatttggaagactagtaagtaaatacatgtttcaacccctgaaaagaaagaccaagccaaagtaaatgttattat

SEQ ID NO: 71437 - DNA, 110 bp, synthetic construct
  source 1..110: mol_type = other DNA
gtgacgatgtcaaacaaatttcccccatctcctggaacaatattgtattcaatctctgcattttgtccaaaatcagggtccacagctcttattcttccaatagctgaacc

SEQ ID NO: 71438 - DNA, 110 bp, synthetic construct
  source 1..110: mol_type = other DNA
gttggacaaaggtaccacagatgttttaccaaaacacacaaatacaatgagaggttttttgtttttttggtttttttttttccattttctttttcagctgccctggggca

SEQ ID NO: 71439 - DNA, 110 bp, synthetic construct
  source 1..110: mol_type = other DNA
tttttgtttttttggtttttttttttccattttctttttcagctgccctggggcatatgaacttcctgggccagggatcagattttagccacaattgcagcctaagctgt

SEQ ID NO: 71440 - DNA, 110 bp, synthetic construct
  source 1..110: mol_type = other DNA
gagtcaaaggggtggacctttgaattcccacatgaacctatcagtagctgtgggtctccctctgggagaaggtatctttgaaaaaatgcaattatctgtgaggatggtga

SEQ ID NO: 71441 - DNA, 110 bp, synthetic construct
  source 1..110: mol_type = other DNA
agagagtcattccatggtagcacatttagacttggcttgcttagagagaaaactcccctgtttgtatctgttccatagaaattgttaggccttagtggatagatttagtg

SEQ ID NO: 71442 - DNA, 110 bp, synthetic construct
  source 1..110: mol_type = other DNA
ccctgtttgtatctgttccatagaaattgttaggccttagtggatagatttagtgacaggtctaaaactcctcacaattgctttaaaggtattaatacactcacacttcc

SEQ ID NO: 71443 - DNA, 110 bp, synthetic construct
  source 1..110: mol_type = other DNA
tgaagcctccagaaaaacaccaaagaacagctttttaatccccgaaatggagccctttcccttctgttgggaaaacaaaacacttccacaggctaccatgcagggctcct

SEQ ID NO: 71444 - DNA, 110 bp, synthetic construct
  source 1..110: mol_type = other DNA
ccatgagaatgcaggttcaatccctggccttactcagtattgcattgccccaagctatggtgtaaatcacagattcagctcagatctggtgttgctgtggctgtggctgc

SEQ ID NO: 71445 - DNA, 110 bp, synthetic construct; identical to SEQ ID NO: 71444
  source 1..110: mol_type = other DNA

SEQ ID NO: 71446 - DNA, 110 bp, synthetic construct
  source 1..110: mol_type = other DNA
tgtggtctacaagtacccctatccaccaagagacctagaaataatcccacctgttcacatctctgataacatgagatggccatttacctgaccacagatccttaagatgc

SEQ ID NO: 71447 - DNA, 110 bp, synthetic construct
  source 1..110: mol_type = other DNA
cacatctctgataacatgagatggccatttacctgaccacagatccttaagatgccttgttacctggctcccatccttcactttcaagttcctggatgtagtcctgcatg

SEQ ID NO: 71448 - DNA, 110 bp, synthetic construct
  source 1..110: mol_type = other DNA
ccagaaattccaaatacatttcagatcacttccctaaaagaactttgattttttaaggacaaatatttcctgacttgtgtcagaatcaatcacaagtcttaccaggcaac

SEQ ID NO: 71449 - DNA, 110 bp, synthetic construct
  source 1..110: mol_type = other DNA
gaatgtttggggtcagttagctcactgggacagagcatggtgctaataactcaaaggatgttttttttcttttagccacttaaagacaactgaaattctgtaatgtgtgt

SEQ ID NO: 71450 - DNA, 110 bp, synthetic construct
  source 1..110: mol_type = other DNA
tgagaatgatatttgctgtgggtttgtcatatatggcctttatcatatccattttttcttatctgctggtatgttgaatcacatggattgattttggaatgttgaacaat

SEQ ID NO: 71451 - DNA, 110 bp, synthetic construct
  source 1..110: mol_type = other DNA
ttcttatctgctggtatgttgaatcacatggattgattttggaatgttgaacaatctttgtattcctgggatgagctccatttggatatattgcattattgttttatata

SEQ ID NO: 71452 - DNA, 110 bp, synthetic construct
  source 1..110: mol_type = other DNA
gagagtgcaatgctggagcaaagactttttcttcaacatgcagactcttcttctttcctgcttggaaaaaaaccaatgaaaatccagagattctgtgtttactgtagctc

SEQ ID NO: 71453 - DNA, 110 bp, synthetic construct
  source 1..110: mol_type = other DNA
tcctgcttggaaaaaaaccaatgaaaatccagagattctgtgtttactgtagctctcccaacttcttttcccttctataaaagtattctccctgttttggcatgttggga

SEQ ID NO: 71454 - DNA, 110 bp, synthetic construct; identical to SEQ ID NO: 71452
  source 1..110: mol_type = other DNA

SEQ ID NO: 71455 - DNA, 110 bp, synthetic construct; identical to SEQ ID NO: 71453
  source 1..110: mol_type = other DNA

SEQ ID NO: 71456 - DNA, 110 bp, synthetic construct
  source 1..110: mol_type = other DNA
caacattcttcgagcagaattatcaacccctactcccacgagcaccagaccctagtaaccagctttgaaagttatatctggtagggagcaaatgcatgagttatttattg

SEQ ID NO: 71457 - DNA, 110 bp, synthetic construct
  source 1..110: mol_type = other DNA
aatggaacagtggttctcccagagaaagagaaaaggcagtgtctggcttgtgtgatgtggtggggagcaaaaggatattgtaatagtcaagtatttagggagattttaaa

SEQ ID NO: 71458 - DNA, 110 bp, synthetic construct
  source 1..110: mol_type = other DNA
tgtggtggggagcaaaaggatattgtaatagtcaagtatttagggagattttaaaaccataattgctttgataaacttctctggtgatttatgttaaagatcctgaatta

SEQ ID NO: 71459 - DNA, 110 bp, synthetic construct
  source 1..110: mol_type = other DNA
taaataagcttataggtaaatacattttcatgggattggaaagttgtgtcaaccacattaatatggaaataagggaaaattggctttccaggatcaattggagacagttt

SEQ ID NO: 71460 - DNA, 110 bp, synthetic construct
  source 1..110: mol_type = other DNA
cattaatatggaaataagggaaaattggctttccaggatcaattggagacagtttgactattcacattatcctttagtgtgcatgcctatttatgacttgcaaatactgt

SEQ ID NO: 71461 - DNA, 110 bp, synthetic construct
  source 1..110: mol_type = other DNA
tttacaaactactacctctgtgctagggcacagagtaagattttaacaacacacattaagtatagtatctgtttcctattgcctgccagctctctcaacattaagttcca

SEQ ID NO: 71462 - DNA, 110 bp, synthetic construct
  source 1..110: mol_type = other DNA
ttaagtatagtatctgtttcctattgcctgccagctctctcaacattaagttccattgtttttcaaagccaaaatttgtggaggaatgtattctccagttcaggacaccc

SEQ ID NO: 71463 - DNA, 110 bp, synthetic construct
  source 1..110: mol_type = other DNA
agtcttaaatgaatgtgtcagcagcactatgttctttctaaagtttctagggaagaatccttccttggttcttcttagcttctagcagatttctaacaatccccgacatt

SEQ ID NO: 71464 - DNA, 110 bp, synthetic construct
  source 1..110: mol_type = other DNA
ttttttagagtggctgactaaactcccccctccaagcagacagaatattggaagctagagaactgaagcctgggtgtcccatcgtgtcctcatgggtagagctatgctga

SEQ ID NO: 71465 - DNA, 110 bp, synthetic construct
  source 1..110: mol_type = other DNA
tagagaactgaagcctgggtgtcccatcgtgtcctcatgggtagagctatgctgaatttacggctcggtacatctatcagtgtatagaaccatattctttgtctgctctt

SEQ ID NO: 71466 - DNA, 110 bp, synthetic construct
  source 1..110: mol_type = other DNA
ccctgtctctggcctttcgtttgctgcttcccatggaagtcacaacagggtatcagagggcaagagagagagagcttttaagttcagccccacatctaagctgcctccag

SEQ ID NO: 71467 - DNA, 110 bp, synthetic construct
  source 1..110: mol_type = other DNA
attcacagttaccatggagcatgtgagtattaagaggtgccacctgaaccaactggcttccacagctattcatccccattcccattgtataaaaaatagccccatgtcct

SEQ ID NO: 71468 - DNA, 110 bp, synthetic construct
  source 1..110: mol_type = other DNA
gcttccacagctattcatccccattcccattgtataaaaaatagccccatgtcctcttgctatcaaggtcaattgcttgtggcagtatagtgacttctcttctactctgg

SEQ ID NO: 71469 - DNA, 110 bp, synthetic construct; identical to SEQ ID NO: 71467
  source 1..110: mol_type = other DNA

SEQ ID NO: 71470 - DNA, 110 bp, synthetic construct; identical to SEQ ID NO: 71468
  source 1..110: mol_type = other DNA

SEQ ID NO: 71471 - DNA, 110 bp, synthetic construct
  source 1..110: mol_type = other DNA
tttggtttccttttatttctttttcttccctggttgccatggctaggacttccaaaacttggttgaatagagtgagagtagatatccttgtcttattcctcatcttagag

SEQ ID NO: 71472 - DNA, 110 bp, synthetic construct
  source 1..110: mol_type = other DNA
ggacttccaaaacttggttgaatagagtgagagtagatatccttgtcttattcctcatcttagaggaaatactttcaggttttcaacattaagtatgatgttagctgtgg

SEQ ID NO: 71473 - DNA, 110 bp, synthetic construct
  source 1..110: mol_type = other DNA
attttttgtttattctggtccatatcggttacttaagagaatgtgcagataacctgcatatcctcctaacgggctgtttcttttaaacttagacatgctccttcaccgac

SEQ ID NO: 71474 - DNA, 110 bp, synthetic construct
  source 1..110: mol_type = other DNA
agccttagagaggtttagctactagagctgttagtggggaaatggatttaaggatgagcttgtctgattgctggtagagcccaagtttttcactagtgagttcagcaaat

SEQ ID NO: 71475 - DNA, 110 bp, synthetic construct
  source 1..110: mol_type = other DNA
gagcttgtctgattgctggtagagcccaagtttttcactagtgagttcagcaaatccaaatcttcctttattttaattaatgattgattgatttttagggctgcactggc

SEQ ID NO: 71476 - DNA, 110 bp, synthetic construct
  source 1..110: mol_type = other DNA
tgtgacattcttaaggaaaagtctcaaagtgaaagagaatgtcaaggtggctttgctgttggttcagccccaccagagcatcagagagcttttccaagtctgggtgagca

SEQ ID NO: 71477 - DNA, 110 bp, synthetic construct
  source 1..110: mol_type = other DNA
ctgttggttcagccccaccagagcatcagagagcttttccaagtctgggtgagcatgaggtgagccctgactctgccctttcctccccaggagccatgggctgtgcgggg

SEQ ID NO: 71478 - DNA, 110 bp, synthetic construct
  source 1..110: mol_type = other DNA
gggtcacggggctgggataggaaaggagaactggataccaggcctctggttgcatggaaggcaccttcctaccctggctgacttcggagtgtgttcttggaaaatgcagc

SEQ ID NO: 71479 - DNA, 110 bp, synthetic construct
  source 1..110: mol_type = other DNA
gatttggcgttgccctgagctgtggtgtaggtcacagatgctgtggctatggtgtaggccggcagctatagttccaattcaaacccacctgggaaactcaatatgctgcg

SEQ ID NO: 71480 - DNA, 110 bp, synthetic construct
  source 1..110: mol_type = other DNA
aggccggcagctatagttccaattcaaacccacctgggaaactcaatatgctgcgggtgaggccctaaaaaaaaaaatagtaaaaataaaagtaaatgaaatgtttacat

SEQ ID NO: 71481 - DNA, 110 bp, synthetic construct
  source 1..110: mol_type = other DNA
gcctctcataatcctgtctgctctgctttcttaacagctgcagattctgtccatgccggtccatctctgctgctgccctttcttcaggccaccctcatctcgcacactcc

SEQ ID NO: 71482 - DNA, 110 bp, synthetic construct
  source 1..110: mol_type = other DNA
tgagtattatactaggtgtagtcatttcataaatggctcttattatgttgagctacattccttctattcctagttcgttatcggtctaaaacttttgataattatatgac

SEQ ID NO: 71483 - DNA, 110 bp, synthetic construct
  source 1..110: mol_type = other DNA
cattccttctattcctagttcgttatcggtctaaaacttttgataattatatgacatttggcatattttaaagatgagttgaaatgcatttttgaagagcctttctggag

SEQ ID NO: 71484 - DNA, 110 bp, synthetic construct
  source 1..110: mol_type = other DNA
ctgccatctctccagcaatgtattgcccacttgttttgtaccagacattctagactctgagcttacaaagatgtattagtcatgattcttaccctcaacaaacttttgtc

SEQ ID NO: 71485 - DNA, 110 bp, synthetic construct
  source 1..110: mol_type = other DNA
tagatactgaaattattcaaccataaatcacaggaatacctgagctactagaagatggaagaggcaaggaaaaatattctttgagccaaccaaggccctttagatatcct

SEQ ID NO: 71486 - DNA, 110 bp, synthetic construct
  source 1..110: mol_type = other DNA
tcttcctctacttaggggcatttaggttgttttcaatattttgtagttacaaagaaagctgtagttagagttcctgtcgtggctcagtgagtaacaaacctgactagtat

SEQ ID NO: 71487 - DNA, 110 bp, synthetic construct
  source 1..110: mol_type = other DNA
ctcaggattgttttggctggtttttgccctggcttaacctgggaggacttccgcaaggagctggaattctttgatttaaagcaatgttgttggcacaatgcctccacctt

SEQ ID NO: 71488 - DNA, 110 bp, synthetic construct
  source 1..110: mol_type = other DNA
aggagctggaattctttgatttaaagcaatgttgttggcacaatgcctccacctttgctgcgctcttagtttggggtagttccaagatagaaatgtttcctgttggcctc

SEQ ID NO: 71489 - DNA, 110 bp, synthetic construct
  source 1..110: mol_type = other DNA
cactctccctcagattctctgggggttaattatatatcctgaatcttcctccctccacctttcacattacccaccattgtacgtccgttaggcttcacttaaatgtcacc

SEQ ID NO: 71490 - DNA, 110 bp, synthetic construct
  source 1..110: mol_type = other DNA
cacctttcacattacccaccattgtacgtccgttaggcttcacttaaatgtcacctcctccatgaggtcttcattgaatacctcccttcttcaaaggatacctatctctc

SEQ ID NO: 71491 - DNA, 110 bp, synthetic construct
  source 1..110: mol_type = other DNA
agcagctcatagaacttctgctcgattgctccaacagccatgaaccccccgtcggccgtcttgtaggtcgtgtagaaaggtgctccaccatctaacatgttctgtccacg

SEQ ID NO: 71492 - DNA, 110 bp, synthetic construct
  source 1..110: mol_type = other DNA
aggttgttgtgtaaatgtcagaatccttccataatacactaaccctgactacataggttcaagttccagcttcttcactttggcaatttacttttttttttttggtcttt

SEQ ID NO: 71493 - DNA, 110 bp, synthetic construct
  source 1..110: mol_type = other DNA
tgttttaaattatcgagtgcatgcaccccaaaaggaaaactccagccattcagatcagatgatttcttggtgacactcaaatgagcacttaacctggataaatccaaagc

SEQ ID NO: 71494 - DNA, 110 bp, synthetic construct
  source 1..110: mol_type = other DNA
cagatgatttcttggtgacactcaaatgagcacttaacctggataaatccaaagcagtcttcttagatggaaagaactgcctcatatgccaatgtcaggatataaaaaaa

SEQ ID NO: 71495 - DNA, 110 bp, synthetic construct
  source 1..110: mol_type = other DNA
acaaaacaaaacaacaataaacaaaccacacaactaactgttgacctaaagaaactgggacatcaagtctacctgagtctaagtcactaagttatctggccaaacagtgc

SEQ ID NO: 71496 - DNA, 110 bp, synthetic construct; identical to SEQ ID NO: 71495
  source 1..110: mol_type = other DNA

SEQ ID NO: 71497 - DNA, 110 bp, synthetic construct
  source 1..110: mol_type = other DNA
tatatctaaacaaatgcttattctcctttaagagaattatagttaaaaatgcatgtcctggctctttgataatcttgattctcattaaatgccctttgatgtactatcag

SEQ ID NO: 71498 - DNA, 110 bp, synthetic construct
  source 1..110: mol_type = other DNA
gttaaggagcaccctagcaggatggaaagcttttaaacagtaatcaggagttccatcatagcttagcatgttgagaacctaactagtatccctgaggttgcgggtttgat

SEQ ID NO: 71499 - DNA, 110 bp, synthetic construct
  source 1..110: mol_type = other DNA
atccacttggcagctcctctggcacacaggtgcccttttagagactcgcatgcatgaaggagcttcttgtggctacgtagtacatctttgtgtgtcaccctaatgaagtt

SEQ ID NO: 71500 - DNA, 110 bp, synthetic construct
  source 1..110: mol_type = other DNA
gtttcatgggactcccttccagatgagctgctcttaggaatcttttcctgtctgtgcctccctgagctcctgaaagtctccagcgtttgtaaaagatggtatcatctagc

SEQ ID NO: 71501 - DNA, 110 bp, synthetic construct
  source 1..110: mol_type = other DNA
agaatttgtaatgtcctatttgcaaattttatgtgggtcatacccaacagaagcctgctggctttcctttttaatagtttttaaaaatttaagcaggctgtttctttgaa

SEQ ID NO: 71502 - DNA, 110 bp, synthetic construct
  source 1..110: mol_type = other DNA
aatgagaagacccgcttccatagcctggttaatcagataacacacagcccatgatggatagctcaggtcatgtggtcatttgtccatgagaagaaaaccgggcctctttc

SEQ ID NO: 71503 - DNA, 110 bp, synthetic construct
  source 1..110: mol_type = other DNA
ggatagctcaggtcatgtggtcatttgtccatgagaagaaaaccgggcctctttctcaaaaaagaaagtaatcaactgacaaatagaagatgactttgctccagactctc

SEQ ID NO: 71504 - DNA, 110 bp, synthetic construct
  source 1..110: mol_type = other DNA
ttacctagaagcttctgaacttgtatctaaacaaaacaaaggaggaatgatgtgttcagggtctgaaaagccttcgatcatactaaaattaaagattaataatcaattag

SEQ ID NO: 71505 - DNA, 110 bp, synthetic construct
  source 1..110: mol_type = other DNA
gcagaacccagcacatagtattgctgcctagcagccttagcttcagtcctccccccttaattctctccctgctatcctttctgcctcttatttaacaaaaatttaaatag

SEQ ID NO: 71506 - DNA, 110 bp, synthetic construct
  source 1..110: mol_type = other DNA
cttaattctctccctgctatcctttctgcctcttatttaacaaaaatttaaatagcaggttgtgggtctcactgagaattcacagttctttctgaccccagagcaccact

SEQ ID NO: 71507 - DNA, 110 bp, synthetic construct
  source 1..110: mol_type = other DNA
atccacctccttttgtaaccttcaggctgtcagttgcctagttagggtctctgattttcatctcacgggggagagagaacagaaagaactgcttgacctctgggttccct

SEQ ID NO: 71508 - DNA, 110 bp, synthetic construct
  source 1..110: mol_type = other DNA
gcgttgtgctcttgggtgcatggggacaggcaacaggtctctttctataaggacatcaaagccacgggtggaagaaggcccatcttagaagaatagaagccattatcagt

SEQ ID NO: 71509 - DNA, 110 bp, synthetic construct
  source 1..110: mol_type = other DNA
acatttaagtccgttaaaatgcaaccattattgttcatttttaaatgtattatttctcacctgcttggtgttaacctggactcaaagctgttggccttcatggtgatggt

SEQ ID NO: 71510 - DNA, 110 bp, synthetic construct; identical to SEQ ID NO: 71509
  source 1..110: mol_type = other DNA

SEQ ID NO: 71511 - DNA, 110 bp, synthetic construct
  source 1..110: mol_type = other DNA
aacaggttctggagattctgattctgattcagatgatcttggatggggctcagaggtctgccctcttgcctagaagctcagggagttctgatgcatgtagacctcggacc

SEQ ID NO: 71512 - DNA, 110 bp, synthetic construct
  source 1..110: mol_type = other DNA
ggatgagttatataggtagcgaggtaactaggccagtacagttgcgcttgggtactgataagtttcagagcctagaaacactctgctcagcccttcgccttgctggtcag

SEQ ID NO: 71513 - DNA, 110 bp, synthetic construct
  source 1..110: mol_type = other DNA
aggttctttatgtttcagcacagaaggagttcagtgagaggtaaagtgttaggtaagaagtaggtatattgagaaagatacatattccatagactaagtgtgggccatct

SEQ ID NO: 71514 - DNA, 110 bp, synthetic construct
  source 1..110: mol_type = other DNA
agaagtaggtatattgagaaagatacatattccatagactaagtgtgggccatcttagaaggtgagaggccctgaaatatgtggtggttagtttttaaggactgactgat

SEQ ID NO: 71515 - DNA, 110 bp, synthetic construct
  source 1..110: mol_type = other DNA
ataacattggttaaacatgtggcagaagagctgagaagccaaacaggagatggtaaaacaacccagagtttggcaacagcagaaagcgaccaccaattttagactggtga

SEQ ID NO: 71516 - DNA, 110 bp, synthetic construct
  source 1..110: mol_type = other DNA
caactcacatcttagagttcgccttaccttgagcaaggaaatcaaccaggcctgtccatcagttttcagcccctggctgctggggggtagagagtaaggaagtggagtca

SEQ ID NO: 71517 - DNA, 110 bp, synthetic construct
  source 1..110: mol_type = other DNA
cttaggaataaatatttagtaaaattacagtcaataagctatgaggagagtgacctagacacttctaggaataaattccttactcctaagtggagcaaaggcaggaggaa

SEQ ID NO: 71518 - DNA, 110 bp, synthetic construct
  source 1..110: mol_type = other DNA
ataaagtgaatgtgtaggagggaccctcttgggtaacagttgcttcacattaattatgccagtaattctggtctttcggtggaaaaacttcaatagtcgatgacctacaa

SEQ ID NO: 71519 - DNA, 110 bp, synthetic construct
  source 1..110: mol_type = other DNA
aaactggttattctggtcacttggagttggctaactgcaacctctcctttctccgtctctcccttccttccattttcccaaattgattggattagctcaggccaggcatt

SEQ ID NO: 71520 - DNA, 110 bp, synthetic construct
  source 1..110: mol_type = other DNA
tctctcccttccttccattttcccaaattgattggattagctcaggccaggcattgaatatggagtccctgtagaactctcatatacaagcttctaaaagtctcagttgc

SEQ ID NO: 71521 - DNA, 110 bp, synthetic construct
  source 1..110: mol_type = other DNA
ttttgacgcctagtagatttatagaacatcacctcctcccagtgtctcaatgaccttcaagagctatacctccaacgaggttgagcaggggggaggggagaaggaggtaa

SEQ ID NO: 71522 - DNA, 110 bp, synthetic construct
  source 1..110: mol_type = other DNA
ataagaagttttttttcactgtgttcatggatctacactgtcaccttcacaccagggggcaacactgacttgatgttggcacatcacagcatcacatgaatgccaagaaa

SEQ ID NO: 71523 - DNA, 110 bp, synthetic construct
  source 1..110: mol_type = other DNA
ctcagatctggcgttgctgtggctgtggtatagacctatagctacagctctgactcagctcatagcctacatttcccatatgctgcaggtgtggccctaaaaataaaata

SEQ ID NO: 71524 - DNA, 110 bp, synthetic construct
  source 1..110: mol_type = other DNA
aaacttcatcaggttagggaaatgtggaatccgttccagacgttccggttagcgtgggaaagcatccagcatctgtattcttagcatcttcccaggctccttgtacaaaa

SEQ ID NO: 71525 - DNA, 110 bp, synthetic construct
  source 1..110: mol_type = other DNA
catgggtttgtttcttcacttccagagaaattctagagaaaatgggcaaggccatattacctagacaaaatagcttgcaaaatttgcaaattttttggcatctaaaaggg

SEQ ID NO: 71526 - DNA, 110 bp, synthetic construct
  source 1..110: mol_type = other DNA
aagatagtttttactgaagggagagtgggaaggcaagtattgtacaccagaggctactggagctgaattttgaactttccatccccattttagaattgggtcaatgttgt

SEQ ID NO: 71527 - DNA, 110 bp, synthetic construct
  source 1..110: mol_type = other DNA
gctaaagtgactgcatcatatagtcattttatgacaatggaaagctcatttcttaaatgggtttaaccttttgattggcttgatgataagacaggacagttagatctaaa

SEQ ID NO: 71528 - DNA, 110 bp, synthetic construct
  source 1..110: mol_type = other DNA
aatgggtttaaccttttgattggcttgatgataagacaggacagttagatctaaaggatgagcatggagggcacggcattatgcttttaggagagaagttttctccgcag

SEQ ID NO: 71529 - DNA, 110 bp, synthetic construct
  source 1..110: mol_type = other DNA
tagctgcagcagagggtaagtgacaaacaggagacatgcacaggggccaggccgtgaaacctgtgggagtttgtgtggaacaggatcggatttggattttgaaagatcac

SEQ ID NO: 71530 - DNA, 110 bp, synthetic construct
  source 1..110: mol_type = other DNA
tgagccctttgatgccttgcctttgctgggccatggttgctacaagtgcctcttcaccattgttataaggtcccaaagtaacacccttgtgttccaggcatattcctctt

SEQ ID NO: 71531 - DNA, 110 bp, synthetic construct
  source 1..110: mol_type = other DNA
accattgttataaggtcccaaagtaacacccttgtgttccaggcatattcctctttagctccttatgaaaatcgcagtcagtaattcccagcactataattagctcctct

SEQ ID NO: 71532 - DNA, 110 bp, synthetic construct
  source 1..110: mol_type = other DNA
ggttaaggatctggcgatgccttgagctgtggtgtaggtctcggacatgcctcggatcccatgttgtggctgtggtatagactagcagctacatctccgattcagcccct

SEQ ID NO: 71533 - DNA, 110 bp, synthetic construct
  source 1..110: mol_type = other DNA
gatgccttgagctgtggtgtaggtctcggacatgcctcggatcccatgttgtggctgtggtatagactagcagctacatctccgattcagcccctagcctggaaacttcc

SEQ ID NO: 71534 - DNA, 110 bp, synthetic construct
  source 1..110: mol_type = other DNA
tctgggtttatttctaggttctctattaggtgccattggtctgtatgtctgctttcacaccagtaccactctgttttgattattgaagctttataatattgtctgaagtt

SEQ ID NO: 71535 - DNA, 110 bp, synthetic construct; identical to SEQ ID NO: 71534
  source 1..110: mol_type = other DNA

SEQ ID NO: 71536 - DNA, 110 bp, synthetic construct
  source 1..110: mol_type = other DNA
cttgtggatcagtgggttaaggatctagcattgttatttgccatggctctagttacatgggtttgtggtatgggtttgacttctggccccaggaacttccacataccaca

SEQ ID NO: 71537 - DNA, 110 bp, synthetic construct
  source 1..110: mol_type = other DNA
catgggtttgtggtatgggtttgacttctggccccaggaacttccacataccacaggcacggccaaaaaaaaaaaaaaaaaaaagtgaatgtgtagattataaaacataa

SEQ ID NO: 71538 - DNA, 110 bp, synthetic construct
  source 1..110: mol_type = other DNA
catgacctctttctagatgttcacagtcatcctttgtgttaaaagcctccctctaccttttctcttcattctctctcttgagcgactaccaagagttctttgagttctcc

SEQ ID NO: 71539 - DNA, 110 bp, synthetic construct
  source 1..110: mol_type = other DNA
ccttttctcttcattctctctcttgagcgactaccaagagttctttgagttctccaagtccagtatgtgtgtagccagagagaggtcttgaaatgagttgaaaactaata

SEQ ID NO: 71540 - DNA, 110 bp, synthetic construct
  source 1..110: mol_type = other DNA
agtgctgtaagtccttttaccatgatgcatattttacaacaactaaatttataatattgcagttaaacaggggtcagcttttttggacagggccagatagcaaatatttc

SEQ ID NO: 71541 - DNA, 110 bp, synthetic construct; identical to SEQ ID NO: 71540
  source 1..110: mol_type = other DNA

SEQ ID NO: 71542 - DNA, 110 bp, synthetic construct
  source 1..110: mol_type = other DNA
accaagaaacatgaagaaacagctcgaaattcttcttttagttaaaggagatgtctaacaaatgtatgaaagctccaacctccttctctttgtttcttgcatttaatttc

SEQ ID NO: 71543 - DNA, 110 bp, synthetic construct
  source 1..110: mol_type = other DNA
taacaaatgtatgaaagctccaacctccttctctttgtttcttgcatttaatttcttaccaagtattacatttctgcccttgcaatgactttacagtctttctcttctta

SEQ ID NO: 71544 - DNA, 110 bp, synthetic construct
  source 1..110: mol_type = other DNA
ttagaagagaggatttgagaaatatttaggaggtgagatgaaaaggagctggcgataggatggtggtgggaagaacagtaagagaggaaaatgagacagtagttcacgtc

SEQ ID NO: 71545 - DNA, 110 bp, synthetic construct
  source 1..110: mol_type = other DNA
tggtcactcctgtcttcattgaacttcctcttccaagtaccaatatctacaccatttcacccccaactcccactccccaacctcaggagttcagaagtcagctttgtctg

SEQ ID NO: 71546 - DNA, 110 bp, synthetic construct
  source 1..110: mol_type = other DNA
ttcacccccaactcccactccccaacctcaggagttcagaagtcagctttgtctgccatcacagagttaaaagtacctaggaattttttttttcttttttcagccaaacc

SEQ ID NO: 71547 - DNA, 110 bp, synthetic construct
  source 1..110: mol_type = other DNA
ttaacataatggctcagaatgctttatagctcctctcttgagcttggttgggctgggaacctctttgaccactagaaatggtgctatatgatttctgaagcaatgtcata

SEQ ID NO: 71548 - DNA, 110 bp, synthetic construct
  source 1..110: mol_type = other DNA
ttaggcagttctgattaaaagaacaagactcagcaggtcttggctggatttgaatatcattccagggtcagctgacagggtaagctttggacaggcctgtccataatcac

SEQ ID NO: 71549 - DNA, 110 bp, synthetic construct
  source 1..110: mol_type = other DNA
tctgcactgctcatttttattttcacattctacttaatcccttcatgcccatttaagctatgggttctatgggttaaagtgcaacttgtactattcttatgggtttcacc

SEQ ID NO: 71550 - DNA, 110 bp, synthetic construct
  source 1..110: mol_type = other DNA
aagacttggatgattagaggttcatggttgccttcattccagtaatctactttgggaccaaaaattttaaatggccaatattggcaatatatctctactaatgtttaaat

SEQ ID NO: 71551 - DNA, 110 bp, synthetic construct
  source 1..110: mol_type = other DNA
actaggtgggggaagtttttcagagaaagtgaaacttgaactcaatcttaccaaagaggtataatttagcttagctggagggataaggagggacatttggtctaggcagt

SEQ ID NO: 71552 - DNA, 110 bp, synthetic construct
  source 1..110: mol_type = other DNA
agtttatgagtttacccatattttcttggttcaccctgccctctgggtatcaacttcttgctcaaaggagcacctcagctgttggtgcctgcatttcctatactaatcct

SEQ ID NO: 71553 - DNA, 110 bp, synthetic construct
  source 1..110: mol_type = other DNA
taataagaaaggagagtggtataaagtggggttagagacgtaggcaggagctgaatcaggtaagcttttaggtccttggtaacaagtttgaatttattatcttaatttta

SEQ ID NO: 71554 - DNA, 110 bp, synthetic construct
  source 1..110: mol_type = other DNA
aggagctgaatcaggtaagcttttaggtccttggtaacaagtttgaatttattatcttaattttaatgggaaatcattagagggtttaaagtaggaaagtgacttaatct

SEQ ID NO: 71555 - DNA, 110 bp, synthetic construct
  source 1..110: mol_type = other DNA
gtgttggcaaaaaccaaaacaaaaaaccaaaacaaaaaaccaaaccaaaacaaaacaaccaccaccaacagctctggcagaaggaatctctgtccctggtgaggcatagg

SEQ ID NO: 71556 - DNA, 110 bp, synthetic construct
  source 1..110: mol_type = other DNA
caaccaccaccaacagctctggcagaaggaatctctgtccctggtgaggcataggtgatatagttagtggttcctctccgatttctccctttcttctctcccgccctcac

SEQ ID NO: 71557 - DNA, 110 bp, synthetic construct
  source 1..110: mol_type = other DNA
ctgtaattggaaccatacaagagtgcgttgtgtgtattggtttttgaacggtaggtttcattatgaaatacatctgagtcagcttgtaaaaatctcacaacaaaaacatc

SEQ ID NO: 71558 - DNA, 110 bp, synthetic construct
  source 1..110: mol_type = other DNA
ggttatgtaatggcctaataatcatttgtcagttgcattgtagctgaattagtgcaggtggaaagtcccttttaaatctaagattctgtgattataggtcacgcaatttt

SEQ ID NO: 71559 - DNA, 110 bp, synthetic construct
  source 1..110: mol_type = other DNA
aatttaacatgctgttgctaaaaagtactgacatctgaccatgccggattaccgtaaatgttcaatttgtgaacagctcggtaactgcaaagtgcaataaagcaaagcac

SEQ ID NO: 71560 - DNA, 110 bp, synthetic construct
  source 1..110: mol_type = other DNA
aaaccccaaactgccacttcggcatatggattattttgagctctaggaattgagaaacagcagacacaggaaaagctctctatctttgccctttctgtctaaaattagga

SEQ ID NO: 71561 - DNA, 110 bp, synthetic construct
  source 1..110: mol_type = other DNA
acacaggctcaagagccaaggaggaggtggtaagttagtctccatgaaggccagccctctctctgacctcaccctccggggacccagtagtgtgcaagatgggggcagta

SEQ ID NO: 71562 - DNA, 110 bp, synthetic construct
  source 1..110: mol_type = other DNA
tcacagagccctggcctgaagtgcaggctgtcagagctcaggagaaaacaaattctttctgtatgaactatgggagcctttttgctctgcttggagagggaggaaaatga

SEQ ID NO: 71563 - DNA, 110 bp, synthetic construct
  source 1..110: mol_type = other DNA
actgactgggtcccaccatacactatggctcttgtcatctcctgcagctgctctacctctgaaatcttaactactatctcaccctcatacagcacttatagttttagctg

SEQ ID NO: 71564 - DNA, 110 bp, synthetic construct
  source 1..110: mol_type = other DNA
cctctgaaatcttaactactatctcaccctcatacagcacttatagttttagctgtctcttctctttacttccccactacctcatcttcagcctcatgaacattcctagt

SEQ ID NO: 71565 - DNA, 110 bp, synthetic construct
  source 1..110: mol_type = other DNA
aaatcttatgggtaggatcactgctaaaaggtgctaatgtcagcttataaactgtggggttttgcaagggtttggggtgaaaagggcggttttcaaacttctaaaagcca

SEQ ID NO: 71566 - DNA, 110 bp, synthetic construct
  source 1..110: mol_type = other DNA
aatactgcccataatgcaagtcccagatcaccacagcaccaaagtgagttgaactaaagatctggccctcccccagtagtcgtctggccctgcccaacagcatgccaaca

SEQ ID NO: 71567 - DNA, 110 bp, synthetic construct
  source 1..110: mol_type = other DNA
tcattagtctacattttaactattggatttattaatgaatgtggtatgaaactatctgacagctgtcagccaggaacaatgtctacataaaccaggggatgagaaaccag

SEQ ID NO: 71568 - DNA, 110 bp, synthetic construct
  source 1..110: mol_type = other DNA
ctgacagctgtcagccaggaacaatgtctacataaaccaggggatgagaaaccagggaagcaaacattatgatcaggaaacattgtggtttcctagattaactgctaatg

SEQ ID NO: 71569 - DNA, 110 bp, synthetic construct
  source 1..110: mol_type = other DNA
ttgccccatgtgttactcattatttctgctattgatcaattgtactttgctgtccaagattcagagatgtgaactatgcagtgttaaaatgcaaagagaacaataaatag

SEQ ID NO: 71570 - DNA, 110 bp, synthetic construct
  source 1..110: mol_type = other DNA
cccttctagatcatttttctgttgtcttaaccttgaccttcttctattttcaatacattttccaaaataaacactagctttgccacagcaccaaagtgatatgagcacag

SEQ ID NO: 71571 - DNA, 110 bp, synthetic construct
  source 1..110: mol_type = other DNA
ctgagggttaggccagaagtgccagggagccaatcaccctctcgccctactcacagcagccctcaaccagtgattcttggggctggtctctaaacaccagctgcattgtc

SEQ ID NO: 71572 - DNA, 110 bp, synthetic construct
  source 1..110: mol_type = other DNA
gcagccctcaaccagtgattcttggggctggtctctaaacaccagctgcattgtcttcagatgtgatgattatgaggtgtgtggtttgacatcattgtccagagtttccc

SEQ ID NO: 71573 - DNA, 110 bp, synthetic construct
  source 1..110: mol_type = other DNA
tggtggatccttgagaagcaaaatgaagacctccaatctgtagagccagtttgcaggcagatgtatgaactcacacccccatacaggggcagggaagagctgtgtgtgtg

SEQ ID NO: 71574 - DNA, 110 bp, synthetic construct
  source 1..110: mol_type = other DNA
ggcagatgtatgaactcacacccccatacaggggcagggaagagctgtgtgtgtgcattgtgggtgtgggagtgaggctggtggaattctgctggagaaacagaaatcac

SEQ ID NO: 71575 - DNA, 110 bp, synthetic construct
  source 1..110: mol_type = other DNA
gtgactcccccaccttgccttgcttttaaaagaagcttccctgaagtccactatgtattcaggtcttttgagcatgagctgcacagttcttgcttggccctgcaataaac

SEQ ID NO: 71576 - DNA, 110 bp, synthetic construct
  source 1..110: mol_type = other DNA
aagaaatatccagataccctgacacagagtgggcccagctcccccagtgatgggggcagtaagaacagcactagaggggcctctgccacatcaaaaacaatcgtccaagg

SEQ ID NO: 71577 - DNA, 110 bp, synthetic construct
  source 1..110: mol_type = other DNA
ccaaaaaataacgatcaaatctttcctttcttctaccaatctcttgtaaggaagaaaatgaggttgttttggcctgccttgctcttgatgaacccaagctggcgcctcct

SEQ ID NO: 71578 - DNA, 110 bp, synthetic construct
  source 1..110: mol_type = other DNA
aaatgaggttgttttggcctgccttgctcttgatgaacccaagctggcgcctcctgccaaataaaaggattctgatttgtttaacaaagcccagcactcaagctcactgg

SEQ ID NO: 71579 - DNA, 110 bp, synthetic construct
  source 1..110: mol_type = other DNA
gagaatctccttcaactatgctctgctcttagtgggaatttgacacatgtttatttaatacatgaatgggtaggtcgtgagattttcttttttcattactcattctgctc

SEQ ID NO: 71580 - DNA, 110 bp, synthetic construct
  source 1..110: mol_type = other DNA
tggatagcttggaattttaacacagttaatgtcaggctcagtttctgcctgaaaaactaggtggtcacgttagctttctctcctggacccaaagaaaatccttattttca

SEQ ID NO: 71581 - DNA, 110 bp, synthetic construct
  source 1..110: mol_type = other DNA
actaggtggtcacgttagctttctctcctggacccaaagaaaatccttattttcataatttagagtctagaatcccatactccccttcttctgcccatgatatgtgacat

SEQ ID NO: 71582 - DNA, 110 bp, synthetic construct; identical to SEQ ID NO: 71580
  source 1..110: mol_type = other DNA

SEQ ID NO: 71583 - DNA, 110 bp, synthetic construct; identical to SEQ ID NO: 71581
  source 1..110: mol_type = other DNA

SEQ ID NO: 71584 - DNA, 110 bp, synthetic construct
  source 1..110: mol_type = other DNA
ttcaactgagtcatcaccccaaagaatctgaggccagaaactagagacggtgtatttgggggagtgggggctggtgagggtaaggacgagctggcttagagtcttttgga

SEQ ID NO: 71585 - DNA, 110 bp, synthetic construct
  source 1..110: mol_type = other DNA
ccaaagtcacaaaactagttttgatacagctgggacttggacttggactcagatttaggtctgaccttagaacctgtatgctttgccatttcatcagatgagagaaaaaa

SEQ ID NO: 71586 - DNA, 110 bp, synthetic construct
  source 1..110: mol_type = other DNA
ctggctgaggtcctctcctgggctatgctattgcattattacatttgatctttcttgatgggcataatggccttccattgctttagagaagactttaaagcaaaatgctg

SEQ ID NO: 71587 - DNA, 110 bp, synthetic construct
  source 1..110: mol_type = other DNA
tgatgggcataatggccttccattgctttagagaagactttaaagcaaaatgctgcagatactggtccttggaagttagccaaccagcacagaagtgccaagacctgggg

SEQ ID NO: 71588 - DNA, 110 bp, synthetic construct
  source 1..110: mol_type = other DNA
tttttcccacacacatatgactctagcacattgtttcatagctgttcatgcatttataactcttctgcctatttgacttgcaactccagcccctagaactacacttgctt

SEQ ID NO: 71589 - DNA, 110 bp, synthetic construct
  source 1..110: mol_type = other DNA
ataactcttctgcctatttgacttgcaactccagcccctagaactacacttgcttgttaagtaaggtggctgcaactgtaatgggcaggatgttccaaaaacttggttaa

SEQ ID NO: 71590 - DNA, 110 bp, synthetic construct
  source 1..110: mol_type = other DNA
aataaaacgtgtggcctggtttattcacttatactaaaagcaagtttccagctgacgcttgattgcattcttaaaggaaaaaaaaaaaaaaaacaaaaactctaatgaga

SEQ ID NO: 71591 - DNA, 110 bp, synthetic construct
  source 1..110: mol_type = other DNA
tagttctgtttctctggaaaaccctgactacagagaaagagagaccatacagagaaaccatgagcagtgagtaaaggcttcttggaatttaccctgtgagtaaaggcttt

SEQ ID NO: 71592 - DNA, 110 bp, synthetic construct
  source 1..110: mol_type = other DNA
aaccatgagcagtgagtaaaggcttcttggaatttaccctgtgagtaaaggctttttggaatttccagcccagcctggccactcatcagatgcagaagttgataccatgt

SEQ ID NO: 71593 - DNA, 110 bp, synthetic construct
  source 1..110: mol_type = other DNA
aggattcacacacaactgtgcacacattttcacctcctcttaatgttctaaatgtactattgtgggctgtttattctttatcaaatacagctactgcaataaattcttgt

SEQ ID NO: 71594 - DNA, 110 bp, synthetic construct
  source 1..110: mol_type = other DNA
ttctaaatgtactattgtgggctgtttattctttatcaaatacagctactgcaataaattcttgttcatccaaaatgagatcctgctgtgtagcactgggaactatgtct

SEQ ID NO: 71595 - DNA, 110 bp, synthetic construct; identical to SEQ ID NO: 71593
  source 1..110: mol_type = other DNA

SEQ ID NO: 71596 - DNA, 110 bp, synthetic construct; identical to SEQ ID NO: 71594
  source 1..110: mol_type = other DNA

SEQ ID NO: 71597 - DNA, 110 bp, synthetic construct
  source 1..110: mol_type = other DNA
ggtaacactgcacttggctggttatcatgctggtagctaagcacctcacctggataattctgaaaacacagccagtcccactggaatctgaagtcacgcagtagttttag

SEQ ID NO: 71598 - DNA, 110 bp, synthetic construct
  source 1..110: mol_type = other DNA
taggctgcagaagccaaatcttaacatacttttgtaactaagtgtctgacatcagtacaaacctttaaagctttacatttttaaaaaatataattcacaggtaatttgtg

SEQ ID NO: 71599 - DNA, 110 bp, synthetic construct
  source 1..110: mol_type = other DNA
aaagtctttttggcttgagacaagacattgcacttccctgacaccccatttttccatttaaaaaaatctgagtggtatcctggggctttagtagcttggaacttttgtac

SEQ ID NO: 71600 - DNA, 110 bp, synthetic construct
  source 1..110: mol_type = other DNA
atttaaaaaaatctgagtggtatcctggggctttagtagcttggaacttttgtacctacagggctagctcagatttagaagagcctgcttatctggactatatttctatg

SEQ ID NO: 71601 - DNA, 110 bp, synthetic construct; identical to SEQ ID NO: 71599
  source 1..110: mol_type = other DNA

SEQ ID NO: 71602 - DNA, 110 bp, synthetic construct; identical to SEQ ID NO: 71600
  source 1..110: mol_type = other DNA

SEQ ID NO: 71603 - DNA, 110 bp, synthetic construct
  source 1..110: mol_type = other DNA
aagtattacaagggactctaacatacaatgatcttcttccaaaaataagtaagcagcacagtacaagctgagggtttaggtcaaaaatagccatttttaagcaataaaca

SEQ ID NO: 71604 - DNA, 110 bp, synthetic construct
  source 1..110: mol_type = other DNA
catcaggaggctcctaggctcaagttgtatagctgttggtgatcctgaattcgtgttcttggttgagctggtgactgacagaccctttcactttaaagctttatttattt

SEQ ID NO: 71605 - DNA, 110 bp, synthetic construct
  source 1..110: mol_type = other DNA
ttcttggttgagctggtgactgacagaccctttcactttaaagctttatttatttcttgattacatttagcaagtaatctgtggagtgatacttagacacagtgggaata

SEQ ID NO: 71606 - DNA, 110 bp, synthetic construct
  source 1..110: mol_type = other DNA
tgccttcagttctgattggggaagagcctgttaggtgtggaggatggtagaaggagctgactgaggactggtaaactcctcatgcaggaacgctggcattgtgggtgtac

SEQ ID NO: 71607 - DNA, 110 bp, synthetic construct
  source 1..110: mol_type = other DNA
gctgactgaggactggtaaactcctcatgcaggaacgctggcattgtgggtgtaccaatttgcatcactctgcccttttgtctcattggacatagatgattgtgtacaga

SEQ ID NO: 71608 - DNA, 110 bp, synthetic construct; identical to SEQ ID NO: 71606
  source 1..110: mol_type = other DNA

SEQ ID NO: 71609 - DNA, 110 bp, synthetic construct; identical to SEQ ID NO: 71607
  source 1..110: mol_type = other DNA

SEQ ID NO: 71610 - DNA, 110 bp, synthetic construct
  source 1..110: mol_type = other DNA
tgtcttatgaatggaagtctgtcctttctacttcctatccttctgccttagttcacaccctcctcaacagagtccaacacatttgttcttttcctgcccttctgaatttg

SEQ ID NO: 71611 - DNA, 110 bp, synthetic construct
  source 1..110: mol_type = other DNA
caccctcctcaacagagtccaacacatttgttcttttcctgcccttctgaatttgtttccacctgccatccctgctgtcagagcagttcccgactctgcagaccactggt

SEQ ID NO: 71612 - DNA, 110 bp, synthetic construct; identical to SEQ ID NO: 71610
  source 1..110: mol_type = other DNA

SEQ ID NO: 71613 - DNA, 110 bp, synthetic construct; identical to SEQ ID NO: 71611
  source 1..110: mol_type = other DNA

SEQ ID NO: 71614 - DNA, 110 bp, synthetic construct
  source 1..110: mol_type = other DNA
gtctttaacccactgagccgcaagaggaactcccagtaataacattcttataggtcactcatctatgcacggcttggggatcatctggcataagccggtctcagctggtc

SEQ ID NO: 71615 - DNA, 110 bp, synthetic construct
  source 1..110: mol_type = other DNA
cactcatctatgcacggcttggggatcatctggcataagccggtctcagctggtctcagtatggttcagtggtgcataagcagatgggctggggtctggcctaggctggg

SEQ ID NO: 71616 - DNA, 110 bp, synthetic construct; identical to SEQ ID NO: 71614
  source 1..110: mol_type = other DNA

SEQ ID NO: 71617 - DNA, 110 bp, synthetic construct; identical to SEQ ID NO: 71615
  source 1..110: mol_type = other DNA

SEQ ID NO: 71618 - DNA, 110 bp, synthetic construct
  source 1..110: mol_type = other DNA
tggcctcgctcagtgggttaagtttccgttgttgccgtgaattgtggtgtaggtggcagacgcggctgagatcacacattgacgtggcttgtggcgtaggctggtggcta

SEQ ID NO: 71619 - DNA, 110 bp, synthetic construct; identical to SEQ ID NO: 71618
  source 1..110: mol_type = other DNA

SEQ ID NO: 71620 - DNA, 110 bp, synthetic construct
  source 1..110: mol_type = other DNA
gccaccttttgaggcaaataactttgtgaaattcctattgatgcaatttgaaaagccattttacacttgccatcttccccaaataaagttattttaacataaaaggtgtt

SEQ ID NO: 71621 - DNA, 110 bp, synthetic construct; identical to SEQ ID NO: 71620
  source 1..110: mol_type = other DNA

SEQ ID NO: 71622 - DNA, 110 bp, synthetic construct
  source 1..110: mol_type = other DNA
tgtttttgccagtgagaagaaattctggggtcaatttcacccttaccaagacttaactcacaaataggaagcctttcatatatagttttcattgttttcccctcttcatc

SEQ ID NO: 71623 - DNA, 110 bp, synthetic construct
  source 1..110: mol_type = other DNA
catttgtggacaacatgaggaaatgtgatctgagagatagtgcagtcagatggatttatagctgattgagtacttctgcccaaagagtgctttgttgtcagctttgttgt

SEQ ID NO: 71624 - DNA, 110 bp, synthetic construct
  source 1..110: mol_type = other DNA
atgcctgactgtcctttcctctttctccttctccttgatttacctagtcaaagtttaatttatctttgggtcttagctttgatctcacctcctctaagacgcctttcctg

SEQ ID NO: 71625 - DNA, 110 bp, synthetic construct
  source 1..110: mol_type = other DNA
ggagaatctaggtgtaaacaaggtgatagcacaaatgtacaccaaaacaaagcacagtcccttggtaggtagctccctcccccgccaccatcattcttaaataatgccac

SEQ ID NO: 71626 - DNA, 110 bp, synthetic construct
  source 1..110: mol_type = other DNA
agtcccttggtaggtagctccctcccccgccaccatcattcttaaataatgccacctaaatgtaaatcccataaagtcatttgaggatgatgccagcattcaactttcca

SEQ ID NO: 71627 - DNA, 110 bp, synthetic construct
  source 1..110: mol_type = other DNA
ggaggctggcatctgagtagctagggtcagtcacagaggccctgcatgcacagtgactaactcctgaaaccctggacaacaagggtcaggtaattttcctatttgacaat

SEQ ID NO: 71628 - DNA, 110 bp, synthetic construct
  source 1..110: mol_type = other DNA
ttggtcttgacagttccacttagttagtgatttaaacagaaaagttttaacattgtagtcacagaattaattaagtataggtgcttttaagcttgatgtgatctactcta

SEQ ID NO: 71629 - DNA, 110 bp, synthetic construct
  source 1..110: mol_type = other DNA
tcccaacccccaccggagccacctactcttcctactgcgggaggccactccacatccgctctcaccggagagagaaattcggctggatccgaagtgactaatgaagggga

SEQ ID NO: 71630 - DNA, 110 bp, synthetic construct
  source 1..110: mol_type = other DNA
tgactgagaatgtgtgggctaacattagaaacaacttattaaaacactagtgcttattaattttaatcaatggtagaatgccagtgggtcgttaataggcacatttgagt

SEQ ID NO: 71631 - DNA, 110 bp, synthetic construct
  source 1..110: mol_type = other DNA
attaattttaatcaatggtagaatgccagtgggtcgttaataggcacatttgagtagggaatacattcttgctttgaaactttgagatatttgagtgaaaactgttgact

SEQ ID NO: 71632 - DNA, 110 bp, synthetic construct
  source 1..110: mol_type = other DNA
gaaggtgagcaggttttagagtccttgcttgagatctctcaccccaaaaagggggagcattttaataaattgccatttggaggtgctggaggaggtcttctatgcactat

SEQ ID NO: 71633 - DNA, 110 bp, synthetic construct
  source 1..110: mol_type = other DNA
atttgagggcagcttggcttctacgggggatgtaagctgaattgagccagaggagtaagaagatcatgagaagcaggagtgcgatagagagaagcagtcttcactgatcc

SEQ ID NO: 71634 - DNA, 110 bp, synthetic construct
  source 1..110: mol_type = other DNA
agcttggtggggtgagtgccttgtacctcgtggatcaagataatctgacaggagattcaagatggtgacatagagaatatcgtgtagtcacttcctcccatggacacacc

SEQ ID NO: 71635 - DNA, 110 bp, synthetic construct
  source 1..110: mol_type = other DNA
ttcaagatggtgacatagagaatatcgtgtagtcacttcctcccatggacacaccagatctacagctacatgtgaaacagtttcctctgaaaaaatctgagaactagctc

SEQ ID NO: 71636 - DNA, 110 bp, synthetic construct
  source 1..110: mol_type = other DNA
acacagagccttagaccctgagggaatgggaagtggggggaggattggcccagaaggaagggaaatgtgatgatagctttggaggatctggaatatcaagcagaaggtac

SEQ ID NO: 71637 - DNA, 110 bp, synthetic construct
  source 1..110: mol_type = other DNA
cagatgttcactctgttaaatatgcttccagcttgccaccttaaaaaagttccgagaattcttataattcttaattataataatttctgggagttcccactgtggtgaag

SEQ ID NO: 71638 - DNA, 110 bp, synthetic construct
  source 1..110: mol_type = other DNA
aggaattggatgcatgcaagagccccggaagggctggaggagggtaggtcaagtgaagcaacacagtttcaggtttgctgctaggttttcaaagaccggaagcttcaggg

SEQ ID NO: 71639 - DNA, 110 bp, synthetic construct
  source 1..110: mol_type = other DNA
ttcttcacctgtcttggttctagctcctctatttatgttactcagggcctcttcccaaagactaatatgcctactggaagacactggttggcttaaaaatactgatgtgg

SEQ ID NO: 71640 - DNA, 110 bp, synthetic construct
  source 1..110: mol_type = other DNA
aaaactgatggtaatggaaggacagcgaggcaagatggaatagcaataatcaaataacagtaatagctaacaattagggaacatttactgggtcagatgttatgctatac

SEQ ID NO: 71641 - DNA, 110 bp, synthetic construct
  source 1..110: mol_type = other DNA
gaaagtggcatagccagaccacataaatttcaaaggaaaagagacttttgcatgagggtccaagagaaatggtttagtgggacatgaagaaacacaaacgcctcccttgg

SEQ ID NO: 71642 - DNA, 110 bp, synthetic construct
  source 1..110: mol_type = other DNA
tagcattcaatcaaactgctctccaacctgcacaactctagggggcagcgttcacagagaaaataatgtgaatggtgtctccttggagctatttaacatactacaaagga

SEQ ID NO: 71643 - DNA, 110 bp, synthetic construct
  source 1..110: mol_type = other DNA
ggtagagaatgacaatgtgacctctaagcaccagaccatagcctttgttcctgactggccaggtccagtcctatgacactccacttcagctaggctttgtttcctcacct

SEQ ID NO: 71644 - DNA, 110 bp, synthetic construct
  source 1..110: mol_type = other DNA
tggccaggtccagtcctatgacactccacttcagctaggctttgtttcctcaccttggattatcagcaatgttgtttcacaatcggctctatctttacaacactaccctt

SEQ ID NO: 71645 - DNA, 110 bp, synthetic construct
  source 1..110: mol_type = other DNA
tgcaggccctcggctcctgttggccaacaggctggctaacccctgaatggaactgaaggtcttttcattcttaagcttcatttcccctcccctcagggacctgcagaagg

SEQ ID NO: 71646 - DNA, 110 bp, synthetic construct
  source 1..110: mol_type = other DNA
tgcagaggttacaagctggtagcctgtgaagctggatctgctcttcaacatgtctggtccccacactgctttagaatatggaaatgtacaataaaattcaagatttctga

SEQ ID NO: 71647 - DNA, 110 bp, synthetic construct
  source 1..110: mol_type = other DNA
agtgatataagaaaggcctgacttgcaactgttcactttgaagatgtttgagaaagggaccatcggccaagcaatgtaggtgtttctagaaaagggaaaagacaaggaat

SEQ ID NO: 71648 - DNA, 110 bp, synthetic construct
  source 1..110: mol_type = other DNA
gggaccatcggccaagcaatgtaggtgtttctagaaaagggaaaagacaaggaatcagactcttccctagagtcattccttaagaaaatacatccctctcaacaccttaa

SEQ ID NO: 71649 - DNA, 110 bp, synthetic construct
  source 1..110: mol_type = other DNA
ggagaatccaggcagcataatcatagggacagccctccctgttctcattccagagatccttctctttccctagataactgctggcaggagtaagaaatagtctctccttt

SEQ ID NO: 71650 - DNA, 110 bp, synthetic construct
  source 1..110: mol_type = other DNA
atccttctctttccctagataactgctggcaggagtaagaaatagtctctccttttggatgacaagttggttctccatggagaactgctatattttctgtccagcagatg

SEQ ID NO: 71651 - DNA, 110 bp, synthetic construct
  source 1..110: mol_type = other DNA
gagggacaactgagggtttgataacaaagggctttaattcccttcctttggtgttgtgctcaattacaaaaggtggtcacagctcttctgaaagatggagaaattgaagc

SEQ ID NO: 71652 - DNA, 110 bp, synthetic construct
  source 1..110: mol_type = other DNA
tacactcaacacaaggcatttcagggtcaggtgattgtctttttgactcatcaataattagccttcaaaaaagagctgcagctcagagtctgtctgtccgtgatatattc

SEQ ID NO: 71653 - DNA, 110 bp, synthetic construct
  source 1..110: mol_type = other DNA
aattagccttcaaaaaagagctgcagctcagagtctgtctgtccgtgatatattctcctctcaccattagccaaagccttcccagtctataaggccagcgatgactagaa

SEQ ID NO: 71654 - DNA, 110 bp, synthetic construct
  source 1..110: mol_type = other DNA
cttacaaagttgtgttaatttcaggcacatggcaaagtaaatcagttatacatatacctatgtccattccttttccgatccttttcccatacaggttaccacacagtact

SEQ ID NO: 71655 - DNA, 110 bp, synthetic construct; identical to SEQ ID NO: 71654
  source 1..110: mol_type = other DNA

SEQ ID NO: 71656 - DNA, 110 bp, synthetic construct
  source 1..110: mol_type = other DNA
aggcggctttcaaaagaactcatcggcacaggtctgtctgcccatgatgtgtgcagggtgcagctcaaaccctgaacatctcggagatgtcccccagtgggaggatgcag

SEQ ID NO: 71657 - DNA, 110 bp, synthetic construct
  source 1..110: mol_type = other DNA
gggtgcagctcaaaccctgaacatctcggagatgtcccccagtgggaggatgcaggcaactggggcatcttggatgtcctcccctggcaagagggaaatgaggtacagag

SEQ ID NO: 71658 - DNA, 110 bp, synthetic construct; identical to SEQ ID NO: 71656
  source 1..110: mol_type = other DNA

SEQ ID NO: 71659 - DNA, 110 bp, synthetic construct; identical to SEQ ID NO: 71657
  source 1..110: mol_type = other DNA

SEQ ID NO: 71660 - DNA, 110 bp, synthetic construct
  source 1..110: mol_type = other DNA
ttgattccttctgtcttcctcatcttctacagctgaagtcaaagttttttggctttttttttttttgtctttttgccacttccttggccgctccctcagcatatggaggt

SEQ ID NO: 71661 - DNA, 110 bp, synthetic construct; identical to SEQ ID NO: 71660
  source 1..110: mol_type = other DNA

SEQ ID NO: 71662 - DNA, 110 bp, synthetic construct
  source 1..110: mol_type = other DNA
gtgggtctaaaaagatcaaaaaaaaaaaaaaaaaaaaaaaagagcctggagtttagctcctaacaacatagcaatgtcagtttctcagccatgacgaatgtagtgatgca

SEQ ID NO: 71663 - DNA, 110 bp, synthetic construct
  source 1..110: mol_type = other DNA
gctcctaacaacatagcaatgtcagtttctcagccatgacgaatgtagtgatgcacggcgtgaaccatggggagcactggggtatctggatcatctttacaacttttctc

SEQ ID NO: 71664 - DNA, 110 bp, synthetic construct
  source 1..110: mol_type = other DNA
ttatagattatctctaaaattcgatctggatagatgggacattctttgtggctttctctacagtgcgtaagaaatccactttcgttgtgttaagctaccaagatgttgat

SEQ ID NO: 71665 - DNA, 110 bp, synthetic construct
  source 1..110: mol_type = other DNA
ctctacagtgcgtaagaaatccactttcgttgtgttaagctaccaagatgttgatggtcttattgcaacatgagttagcctattccaatggatacagtggtttttatctg

SEQ ID NO: 71666 - DNA, 110 bp, synthetic construct
  source 1..110: mol_type = other DNA
ctatcagagcacagactggccacaaggccaaggagatgaaggaaacgaagtgatttattggaaatagttatcttcttttactttttgatccccccccccttcttgtcatt

SEQ ID NO: 71667 - DNA, 110 bp, synthetic construct
  source 1..110: mol_type = other DNA
gggacccagagagtgaggggcccaggctcttcttaatggagagtcagcccctaggaaagagcaagggttctggcctgggagcccctgaggactgggaccaggtgtgtctc

SEQ ID NO: 71668 - DNA, 110 bp, synthetic construct
  source 1..110: mol_type = other DNA
aaagagcaagggttctggcctgggagcccctgaggactgggaccaggtgtgtctccctcaacgctgtatcaccaagtgagagagggacccctgtgtgacctgagagacca

SEQ ID NO: 71669 - DNA, 110 bp, synthetic construct
  source 1..110: mol_type = other DNA
tcctgaagttcctgcttcctggtttcaaagtttatgacgaagctacagtaatcaagagagtgtggtattggagttcccattgcggctcagcagtaacaaacccgactagc

SEQ ID NO: 71670 - DNA, 110 bp, synthetic construct
  source 1..110: mol_type = other DNA
ttcctggtttcaaagtttatgacgaagctacagtaatcaagagagtgtggtattggagttcccattgcggctcagcagtaacaaacccgactagcatctatgaggatgca

SEQ ID NO: 71671 - DNA, 110 bp, synthetic construct
  source 1..110: mol_type = other DNA
agccacagccacaatcgatcagagctgcatccatgacctatggtgaaacttgcgtcaacaccagatcctttaacccacggatcgaggccaaggatcagatggaacccaca

SEQ ID NO: 71672 - DNA, 110 bp, synthetic construct
  source 1..110: mol_type = other DNA
gacctgccaccgaactgggtgtctctcagagagggggattgggctgagaggctggggagacatcctgaattctgtccttgctagggagctaggtgtcagaatgcacctgg

SEQ ID NO: 71673 - DNA, 110 bp, synthetic construct
  source 1..110: mol_type = other DNA
ggagacatcctgaattctgtccttgctagggagctaggtgtcagaatgcacctggccaacacccagcggggctggggaagacgtggcatgtgcgaggggacagcaacaag

SEQ ID NO: 71674 - DNA, 110 bp, synthetic construct; identical to SEQ ID NO: 71672
  source 1..110: mol_type = other DNA

SEQ ID NO: 71675 - DNA, 110 bp, synthetic construct; identical to SEQ ID NO: 71673
  source 1..110: mol_type = other DNA

SEQ ID NO: 71676 - DNA, 110 bp, synthetic construct
  source 1..110: mol_type = other DNA
gcccaagtactggtgaggtaatacctgctaaataaattatgtaaaaaaataacaatattgtgtttcccccttacaaaagcaatttcagcttgtgataataaatgagggaa

SEQ ID NO: 71677 - DNA, 110 bp, synthetic construct
  source 1..110: mol_type = other DNA
tcctctatccacgggtgcctgatgcagagggtgacgggagactgagaactacattggctcagctgcctgtactgtgtgaggcagtctctccctgaaggaaatggccactc

SEQ ID NO: 71678 - DNA, 110 bp, synthetic construct
  source 1..110: mol_type = other DNA
ggctcagctgcctgtactgtgtgaggcagtctctccctgaaggaaatggccactcttttcacaaagcagctcttgcttccaacaggtcctcccagagcagaggccttttt

SEQ ID NO: 71679 - DNA, 110 bp, synthetic construct
  source 1..110: mol_type = other DNA
ttctcctgcagacccagaccttttaggttccccttggctctggtgttcagctccccagcctgtggtgttgggctccccagcctatggcacaccactctctagcctctcag

SEQ ID NO: 71680 - DNA, 110 bp, synthetic construct
  source 1..110: mol_type = other DNA
ttcagctccccagcctgtggtgttgggctccccagcctatggcacaccactctctagcctctcagactgtctccatactgtcaatcctagttctctccccagaactgacc

SEQ ID NO: 71681 - DNA, 110 bp, synthetic construct; identical to SEQ ID NO: 71679
  source 1..110: mol_type = other DNA

SEQ ID NO: 71682 - DNA, 110 bp, synthetic construct
  source 1..110: mol_type = other DNA
ggttccccttggctctggtgttcagctccccagcctgtggtgttgggctccccagcctatggcacaccactctctagcctctcagactgtctccatactgtcaatcctag

SEQ ID NO: 71683 - DNA, 110 bp, synthetic construct
  source 1..110: mol_type = other DNA
tctggaaccttattctgcctctgctgtcagcctgtggtctgggctggaggtgcgtcagtccgggcctgtggtcttttggttccttctggtcataaacccttgctgggcag

SEQ ID NO: 71684 - DNA, 110 bp, synthetic construct
  source 1..110: mol_type = other DNA
cggcctggctcactgttgtggtgcaggttcagtctctggcctgagaattcccacgtgccatggttttagcacctgccccctcaaatgtaaaccaactatgcttgaattaa

SEQ ID NO: 71685 - DNA, 110 bp, synthetic construct
  source 1..110: mol_type = other DNA
atgtttgggaagcactgtggtgcatccaaacatttgtgggaagggatgtgtccgattctaagggaaaaatgatgctcaggttctccagccctgagacaggaagcagcagc

SEQ ID NO: 71686 - DNA, 110 bp, synthetic construct
  source 1..110: mol_type = other DNA
ttgagctggggccatggttataggacaaggatgccaagcttctgggtgccagtcattccttggagggtataaacaggaaggaattgcttaacactggagttgaaaatgcc

SEQ ID NO: 71687 - DNA, 110 bp, synthetic construct
  source 1..110: mol_type = other DNA
agatggaagtggacttgtgtgaagtgagatcaggtgagaggcccaggctgagcaagtccctgtctaatgactagatggccagggaagcctttatgtcctgtcgctgcagg

SEQ ID NO: 71688 - DNA, 110 bp, synthetic construct
  source 1..110: mol_type = other DNA
gtccctgtctaatgactagatggccagggaagcctttatgtcctgtcgctgcaggacatccacatgcagatggactacctaccagctgtggctccagggctccagcagca

SEQ ID NO: 71689 - DNA, 110 bp, synthetic construct
  source 1..110: mol_type = other DNA
agggaccacacctgcatcctcacggactctagtcaggttcttaacctgcggagtcccattatgagctttcttaattctttgacttttattcattttccatgatttggaga

SEQ ID NO: 71690 - DNA, 110 bp, synthetic construct
  source 1..110: mol_type = other DNA
gaggctctgtcttgctagggaatgtagcttccatgcatttgtaaagtgagacccaacagtgtgtatctgagatgccaagaattcatcagcacaaggtggaaggggtagga

SEQ ID NO: 71691 - DNA, 110 bp, synthetic construct
  source 1..110: mol_type = other DNA
acttcacaggaattaccaacttagagcaatccatagacctccgaaactaaggacaacatacaggaagtcaaagaacagcttatggttctgagagccttacttcctccttt

SEQ ID NO: 71692 - DNA, 110 bp, synthetic construct
  source 1..110: mol_type = other DNA
ccttggctgctgggaaagcagaaagcgttgaaaaactgttctgtgtttattagcgaagctattgtagagggtgattggggtttcattataagaggcctgcaaacattttt

SEQ ID NO: 71693 - DNA, 110 bp, synthetic construct
  source 1..110: mol_type = other DNA
tggaaaagtgtgtcttcctaaagacgagcaatttagatgtagagataagtttcgagcattttaaaatctcaatatccatatttgtttccaatatctataatcatccatat

SEQ ID NO: 71694 - DNA, 110 bp, synthetic construct
  source 1..110: mol_type = other DNA
cagcagataaataccattacatcctgtcctggctcctcactttataccaagagaaagacttttcaaagggaccccaaggagatcttaacatacatcctagagataggcct

SEQ ID NO: 71695 - DNA, 110 bp, synthetic construct
  source 1..110: mol_type = other DNA
agacttttcaaagggaccccaaggagatcttaacatacatcctagagataggcctaaggtttggcatgtgattcttactgggaaaactctgaagggaaatgttggtgcct

SEQ ID NO: 71696 - DNA, 110 bp, synthetic construct
  source 1..110: mol_type = other DNA
attattgtgatatttcagctcattttacatttccaaccaatagcctccctacttggctactcaaatctaaaaatctagatcatgattaagttactgtgcaaaatggtttg

SEQ ID NO: 71697 - DNA, 110 bp, synthetic construct; identical to SEQ ID NO: 71696
  source 1..110: mol_type = other DNA

SEQ ID NO: 71698 - DNA, 110 bp, synthetic construct
  source 1..110: mol_type = other DNA
gggagaagagaagtgtttaggcaaacagctcttgaaaagtgaatagcagtttggttgaatataaagatgcacatgtgcaaggggagatggagattatcctgttttatctg

SEQ ID NO: 71699 - DNA, 110 bp, synthetic construct
  source 1..110: mol_type = other DNA
ccaattacaaagtgtgttgatgtgactttcaatcacattttgcctggatgttactgaagatttccacattctcttctcaaacttgaatcatgtcactaatgaaaagatta

SEQ ID NO: 71700 - DNA, 110 bp, synthetic construct
  source 1..110: mol_type = other DNA
gacaagggataaaaaggggagaaatgcaactgtcttgtcaatttaaacatgtgccctgttcttttctcatggccaggggatactctaattcattggttcccatactctga

SEQ ID NO: 71701 - DNA, 110 bp, synthetic construct
  source 1..110: mol_type = other DNA
gtctgtcacttttgaagataccagttcaaatcttgatgccaagaatggggaaaattgggctaatgactggcctttttaggcagtgagggacagatctcaaaaaaatatag

SEQ ID NO: 71702 - DNA, 110 bp, synthetic construct
  source 1..110: mol_type = other DNA
tgggctaatgactggcctttttaggcagtgagggacagatctcaaaaaaatatagagaaggcataagctttaataaagaaaatagttatttggaaactttttaagtttgg

SEQ ID NO: 71703 - DNA, 110 bp, synthetic construct
  source 1..110: mol_type = other DNA
accattgttttacaattcccaaagattcttcccctgagatttcccatgacagctttaaaattgtaaaattatgtaaaaattgcacaaagcatataatgttggaccagatt

SEQ ID NO: 71704 - DNA, 110 bp, synthetic construct
  source 1..110: mol_type = other DNA
ttcttcccctgagatttcccatgacagctttaaaattgtaaaattatgtaaaaattgcacaaagcatataatgttggaccagatttgtcattttatgttatgccatcatc

SEQ ID NO: 71705 - DNA, 110 bp, synthetic construct
  source 1..110: mol_type = other DNA
agggatgtgtttttaactcaaaggcaaagcagaaagtgccagagctctgaaataagacatttccatttgaatatcagcgctgtcttttaccctgtataaccctgagttag

SEQ ID NO: 71706 - DNA, 110 bp, synthetic construct
  source 1..110: mol_type = other DNA
aagttccaaaaagcaaaacttggatttgtggcacaccaactatttacacagcttatacattgtattaggtattataaataatctagagatgatttaaagtgtacaggaag

SEQ ID NO: 71707 - DNA, 110 bp, synthetic construct; identical to SEQ ID NO: 71706
  source 1..110: mol_type = other DNA

SEQ ID NO: 71708 - DNA, 110 bp, synthetic construct
  source 1..110: mol_type = other DNA
cctcattcccttcactccccaaaccaggtcttcttccactctccctattgcagcaaataatactctcatctaccaagctgggaaaaccagaaatgtgtatgttatcttgc

SEQ ID NO: 71709 - DNA, 110 bp, synthetic construct
  source 1..110: mol_type = other DNA
agattttggtatttgtgataggtggtagaactaatcctctttggatgctgaggggtgaatgttgtcagaatagagctggaaaatgtgtattaatagataaagtatggagg

SEQ ID NO: 71710 - DNA, 110 bp, synthetic construct
  source 1..110: mol_type = other DNA
tgaatgttgtcagaatagagctggaaaatgtgtattaatagataaagtatggaggttccttagaaaactacatagaactaccatatgacccggcaaccccactcttgggc

SEQ ID NO: 71711 - DNA, 110 bp, synthetic construct
  source 1..110: mol_type = other DNA
gtttagtaaattaatatctgcatatacgcaaatcgtgtatattggcagtgtttggtgttttcatgtcaatgtggatgtatttgtctctctcccatgtccattttggtaca

SEQ ID NO: 71712 - DNA, 110 bp, synthetic construct
  source 1..110: mol_type = other DNA
tgttttcatgtcaatgtggatgtatttgtctctctcccatgtccattttggtacaaaataacaacctttttttttccccccttcttttcttgtcaatttcacaggattat

SEQ ID NO: 71713 - DNA, 110 bp, synthetic construct
  source 1..110: mol_type = other DNA
aatgaaattctctttgtagacgcatttaatttggagaaagagagacttatttctcataaatacatgaagctggaaataaatctgaaaacttagttgtgctgatggatgca

SEQ ID NO: 71714 - DNA, 110 bp, synthetic construct
  source 1..110: mol_type = other DNA
aaccataattcagtgcctgttgtgtgccagagatgacataggccctagagatacagataagtttgagagtagattctgctgtctgtgggacattgaaaagtcttttccct

SEQ ID NO: 71715 - DNA, 110 bp, synthetic construct
  source 1..110: mol_type = other DNA
cgtctccggaaatggaacccagtagcccacaccaaacctgggcttatctgactcctctttctttcccagcctcccctccatcttctgcaaggcctgtgagctctaccctc

SEQ ID NO: 71716 - DNA, 110 bp, synthetic construct
  source 1..110: mol_type = other DNA
tctttctttcccagcctcccctccatcttctgcaaggcctgtgagctctaccctcacagctcacaggaacccaatgtctcactctcagccaagcccaatcaccttccact

SEQ ID NO: 71717 - DNA, 110 bp, synthetic construct
  source 1..110: mol_type = other DNA
acagggattttgagagttgaaactcttataggtggccaagaaagactgagaagatcacattgagtaaagacttgaaggtatattggtgaattgaccagacatctgagaat

SEQ ID NO: 71718 - DNA, 110 bp, synthetic construct
  source 1..110: mol_type = other DNA
ccaatggtggcccctcattgcctaggtgggtgcgaaaagcttttaggaggtgagatgtggaggaagttcacctgccagggccaagggacagcatgagatagtcatgcatc

SEQ ID NO: 71719 - DNA, 110 bp, synthetic construct
  source 1..110: mol_type = other DNA
tgtggaggaagttcacctgccagggccaagggacagcatgagatagtcatgcatcagtgacctgcctggggtggtctagtggcaaggggaggagagggagatggaccagg

SEQ ID NO: 71720 - DNA, 110 bp, synthetic construct
  source 1..110: mol_type = other DNA
cctactggcaatgatcttcccctgccatgggggattttctaggataataaatctctcttcagtggctgtaatacgtcaattaatgagctgaaaaggcagaaatgaaaaag

SEQ ID NO: 71721 - DNA, 110 bp, synthetic construct
  source 1..110: mol_type = other DNA
ataaaccgagagacctggttgtaccagctgtatcacctctgctaagtccctttttctctctggccttagaatctggatctgccaaggagagataatcacatctctttgct

SEQ ID NO: 71722 - DNA, 110 bp, synthetic construct
  source 1..110: mol_type = other DNA
gcacgtggaaagtgttttgctcatttctttgttttatgattattgtcagtcctgcactctagcacacaagctccttttctacagtgttcatagctgatgactctaatgct

SEQ ID NO: 71723 - DNA, 110 bp, synthetic construct
  source 1..110: mol_type = other DNA
actctagcacacaagctccttttctacagtgttcatagctgatgactctaatgcttagaaccaaatgacacatgcaggcctcgattacattttttttaatgaattaataa

SEQ ID NO: 71724 - DNA, 110 bp, synthetic construct
  source 1..110: mol_type = other DNA
gattcccccttctcagtataagaatgttttaatttggtgcccaatagagaagtgcccatatggttctttaattagtttatatctctctaagcattattatttgtccctga

SEQ ID NO: 71725 - DNA, 110 bp, synthetic construct
  source 1..110: mol_type = other DNA
ttaaggagcctccgtactgcttcccctacactgacttatatgcatgcctttgcctctgccccagctagtgattgctctaatctttaagctggaaaggctccacctgctag

SEQ ID NO: 71726 - DNA, 110 bp, synthetic construct
  source 1..110: mol_type = other DNA
ctgccccagctagtgattgctctaatctttaagctggaaaggctccacctgctagtgtcctaaagggaaacatctgccccatgatcattaatctgaggagctatgaggga

SEQ ID NO: 71727 - DNA, 110 bp, synthetic construct
  source 1..110: mol_type = other DNA
acttgactagcagtgttgccttagcggtgtcctaattggaaaagacccaagaaaaagaaaaattaacaggctgctcctgtccacatgtctcaaatattactccaaatgtg

SEQ ID NO: 71728 - DNA, 110 bp, synthetic construct
  source 1..110: mol_type = other DNA
tgaggtttggtggtgttgagggcaaggatttcctgaggaagtacagctcagatgagacctcaagaatgaactgaactgaactgagtaaagagcataagtgatagcattta

SEQ ID NO: 71729 - DNA, 110 bp, synthetic construct
  source 1..110: mol_type = other DNA
atttgtgaggtaagtgccattattatccctatttataagaggatgagggaggtgaaatcagtttcacaggatcacagagcttttaagagtctagctggaatgcaagactg

SEQ ID NO: 71730 - DNA, 110 bp, synthetic construct
  source 1..110: mol_type = other DNA
tgctacatgcctttcagctgctgtggggtgtgccagcagcattatttactgcattgtatggcttcttttcccagatggctcttacctcactggctgaagctcagaaaaga

SEQ ID NO: 71731 - DNA, 110 bp, synthetic construct
  source 1..110: mol_type = other DNA
gtatggcttcttttcccagatggctcttacctcactggctgaagctcagaaaagaaaaaagaaggaagaaggtgtctgagggtggggtgtgaagaaagctgacatgtctt

SEQ ID NO: 71732 - DNA, 110 bp, synthetic construct
  source 1..110: mol_type = other DNA
gaacagactgcagtgtcagcaagtctgactccatgactgtgtgtttcattgcagtgctatgtccacagagcttctccatgcctggttgaaaagtctggtgtgtcaggtag

SEQ ID NO: 71733 - DNA, 110 bp, synthetic construct
  source 1..110: mol_type = other DNA
ccaggcaggtctgtggaagaatgcagagggtgtgctgggcttcctagaggcttgggataacagaggcctcccagctgagagggttagctcagggtttcagagaaattgca

SEQ ID NO: 71734 - DNA, 110 bp, synthetic construct
  source 1..110: mol_type = other DNA
tgcagctcgtgtcattgcagaagtgtggattcgattcccagccccagttgcagcaggttaaaggatctggcattgttgcagctgcagcttggattcagtccctgcctggg

SEQ ID NO: 71735 - DNA, 110 bp, synthetic construct
  source 1..110: mol_type = other DNA
tggattcgattcccagccccagttgcagcaggttaaaggatctggcattgttgcagctgcagcttggattcagtccctgcctgggtacttccatatgctgcagttgtggc

SEQ ID NO: 71736 - DNA, 110 bp, synthetic construct
  source 1..110: mol_type = other DNA
tgaaggataagttgaacatcaaacatgaagactgggaaggtctccagggcagcgaggtctcaaactccatccaggaccctccgtctcttatttctggcttttctgctaac

SEQ ID NO: 71737 - DNA, 110 bp, synthetic construct
  source 1..110: mol_type = other DNA
ggtctcaaactccatccaggaccctccgtctcttatttctggcttttctgctaacttcattctctaggaaattttggtggtttgggtggagaacatggctgctaacagtt

SEQ ID NO: 71738 - DNA, 110 bp, synthetic construct
  source 1..110: mol_type = other DNA
accctgtaggagttgatggagagaaagcaattcctgtccctttccttgtcattatttttgactggtctttgtcttgtcctggagactggaggtgtggagggttttatttt

SEQ ID NO: 71739 - DNA, 110 bp, synthetic construct
  source 1..110: mol_type = other DNA
acatgcatggattcctggtaactagtgattctgtccttttcaaatttcataccgtctttgtttcggtttatttagatttcagctttacttcattgtctgttttttaaaat

SEQ ID NO: 71740 - DNA, 110 bp, synthetic construct
  source 1..110: mol_type = other DNA
cctcagccatgcccttagcccgctgtgacacagtactgaaacttcacatccattcgtaaccacaggttgatgaactggctgggggtgaggatgccctatgtgacgtcagc

SEQ ID NO: 71741 - DNA, 110 bp, synthetic construct
  source 1..110: mol_type = other DNA
acaaataaggcaacagaggtctagagacatttaaagatttggcctcatttaaatagctcatctctaatggtgctagggctagaatcccactactcctactccacagtttt

SEQ ID NO: 71742 - DNA, 110 bp, synthetic construct
  source 1..110: mol_type = other DNA
gcaatgtgcccagatgtatcaaacactggctgaggctacttttagttcccatttccactggtaaccaacttcccataaaccctcagtcagcctcagcccaggtcagacca

SEQ ID NO: 71743 - DNA, 110 bp, synthetic construct
  source 1..110: mol_type = other DNA
cactggtaaccaacttcccataaaccctcagtcagcctcagcccaggtcagaccactctgaggaggaggggaatgaatttgaaaatacacttcattaggactgatgagaa

SEQ ID NO: 71744 - DNA, 110 bp, synthetic construct
  source 1..110: mol_type = other DNA
agggttcaaggaaatctaagaatcacatttcacagctcatgaaaatcatatgacattccaattgcagtgcccacaaacaaagttttattagaacatatacacattggcta

SEQ ID NO: 71745 - DNA, 110 bp, synthetic construct
  source 1..110: mol_type = other DNA
ataatatctttccatccctctaaaatggtaagctccagagccctcaaatcatatatttgtgaaattggaaataaagaggtatcagtcccaccaaagctgagaataagcaa

SEQ ID NO: 71746 - DNA, 110 bp, synthetic construct
  source 1..110: mol_type = other DNA
acttagaataaatggaggagtatttaagcaaaagaaggtaccttgagattgtgagacacagaacacaatgcctcaggtgtctatttatgttttccaacaggcttaggaac

SEQ ID NO: 71747 - DNA, 110 bp, synthetic construct
  source 1..110: mol_type = other DNA
acacagaacacaatgcctcaggtgtctatttatgttttccaacaggcttaggaacaactagataaataaacaagtttgtaagctcacatcgtttacccaggactacctgt

SEQ ID NO: 71748 - DNA, 110 bp, synthetic construct
  source 1..110: mol_type = other DNA
accccccactctctgtccaccagtccaaacaaacagcacctgaaaccagatctttctctgatggcttagctgtgtacacagagacattccccagtttgaatatggtttct

SEQ ID NO: 71749 - DNA, 110 bp, synthetic construct
  source 1..110: mol_type = other DNA
agaagagtcaaattttccatcatattttgaagatatccgtgacctcaaagaatattttaaaaccctagactaaagaatttctaagattttctgcaacattagcattctgt

SEQ ID NO: 71750 - DNA, 110 bp, synthetic construct
  source 1..110: mol_type = other DNA
actctctgtcgtggtctttaacgcccacccctgcatgcttcccttacaggccctaccttgatgcctccacaccaatcctgtgggttttcttctagttcccgaatcgccaa

SEQ ID NO: 71751 - DNA, 110 bp, synthetic construct
  source 1..110: mol_type = other DNA
aacagagacactgcggagtcggaatacccccatcagagagcatgcgtgatagttcggtttcgaagctcctgaatatactctctggcgtgggcgactgctgtctttggtgc

SEQ ID NO: 71752 - DNA, 110 bp, synthetic construct
  source 1..110: mol_type = other DNA
tccctagaagaggttatctgcttttgacttgagacaggccccaaaccaggcctatgatgggtggactggggacgttgtgaaagatggctgggagtgtgtgtgtgagtgtg

SEQ ID NO: 71753 - DNA, 110 bp, synthetic construct
  source 1..110: mol_type = other DNA
ttatagcacagaggtggagaaagtcattaatcccaaatggccaatttccttcttccaaaaacttcagagagcatattttaggtatctttctttcaccagaagaacttcca

SEQ ID NO: 71754 - DNA, 110 bp, synthetic construct
  source 1..110: mol_type = other DNA
gtgtctgtatctgaaaaagcagaagtggtatgcccacttcacagccttgtcaggaggataggataatatataccatgttcttggcccacgtaaggggcttaaaactggtg

SEQ ID NO: 71755 - DNA, 110 bp, synthetic construct
  source 1..110: mol_type = other DNA
tatgaaacacttctggccaccttttttgaagttctaagattttctgagaaagatgacaggagtagaggacccaaagccaggaggttgcttctgcagcaagtgaagtcaga

SEQ ID NO: 71756 - DNA, 110 bp, synthetic construct
  source 1..110: mol_type = other DNA
cagtgccctctcagtgtcttgcatccccagcacctccacctgccacttctcctatgtaactagatttgtggccaaagtgagtaaactcagactctgtagatttgttccca

SEQ ID NO: 71757 - DNA, 110 bp, synthetic construct
  source 1..110: mol_type = other DNA
gtaactagatttgtggccaaagtgagtaaactcagactctgtagatttgttcccacaaatcagataattatccagataattatgtctttatttaggcattgagcctgagt

SEQ ID NO: 71758 - DNA, 110 bp, synthetic construct; identical to SEQ ID NO: 71756
  source 1..110: mol_type = other DNA

SEQ ID NO: 71759 - DNA, 110 bp, synthetic construct; identical to SEQ ID NO: 71757
  source 1..110: mol_type = other DNA

SEQ ID NO: 71760 - DNA, 110 bp, synthetic construct
  source 1..110: mol_type = other DNA
tcccgccacgtctaagacactgtactataggttaaggataacccccgtgaactcctcttccccttggtccctgtatttgtggagtttcttagctagtagagcaggcaggc

SEQ ID NO: 71761 - DNA, 110 bp, synthetic construct
  source 1..110: mol_type = other DNA
ggacacagacagaaagtagactaagaaaaaaaatgaagagagcttcagggacatgtggaaataaaggtctaacatttctatcactgaagtcctggaaggagaggacaaaa

SEQ ID NO: 71762 - DNA, 110 bp, synthetic construct
  source 1..110: mol_type = other DNA
aggagttctggccccatcctgattctctttttcttatatctctgttttcctttctttctacccagttatgtgaaggttttctttccatttttggaagtttcaggtattct

SEQ ID NO: 71763 - DNA, 110 bp, synthetic construct
  source 1..110: mol_type = other DNA
ttaaacatccatgtccctgaagtctcgtattgtcttcagcaagtgttagatcctcatgaaatccagccaaaaggtattcatgaggcatcaaggtctgcttttaggctact

SEQ ID NO: 71764 - DNA, 110 bp, synthetic construct
  source 1..110: mol_type = other DNA
gatcagaaccaagacaagaatatccaccccataacttttattcaacatagtttcagaagtcttagccatggcaataatcaaataagaaaaagaaattaaaggaattcaaa

SEQ ID NO: 71765 - DNA, 110 bp, synthetic construct
  source 1..110: mol_type = other DNA
gtcagtacattcattataccttaacttaatggtacagttacttttggacttgtgtcttagcccaggtgtcaatgatagaattttagacatctgcagggcgtgcaggaagg

SEQ ID NO: 71766 - DNA, 110 bp, synthetic construct
  source 1..110: mol_type = other DNA
cttagcccaggtgtcaatgatagaattttagacatctgcagggcgtgcaggaaggcagggctggacagggggccctctgaggtctctgaaatccctccataaaactcacc

SEQ ID NO: 71767 - DNA, 110 bp, synthetic construct
  source 1..110: mol_type = other DNA
atcaaatgacagggtgggtgtcaggcagcggagctcagccttagcactactggtacctgggattggatcattcttgcggtgggggccttcctgtgcaccttacgataact

SEQ ID NO: 71768 - DNA, 110 bp, synthetic construct
  source 1..110: mol_type = other DNA
tagcctgggaactttcagatgcaatgggtgcagccattgaacaccctggttccaggagttcgtcatggctcagcagtaaaaaacccaactaggaaccatgaggatgcggg

SEQ ID NO: 71769 - DNA, 110 bp, synthetic construct
  source 1..110: mol_type = other DNA
cagatgcaatgggtgcagccattgaacaccctggttccaggagttcgtcatggctcagcagtaaaaaacccaactaggaaccatgaggatgcgggttcgatcctggcctt

SEQ ID NO: 71770 - DNA, 110 bp, synthetic construct
  source 1..110: mol_type = other DNA
aagctggattattaacctgcaccacagtgggaactcagaagagctcttattataacctttattatggaaaatttaaaacaggtcccaaagtatacaaggtggcataatga

SEQ ID NO: 71771 - DNA, 110 bp, synthetic construct
  source 1..110: mol_type = other DNA
cctttattatggaaaatttaaaacaggtcccaaagtatacaaggtggcataatgaacctccccacaacacgcccctagcttcaatgaagatcagtcacatccagttttaa

SEQ ID NO: 71772 - DNA, 110 bp, synthetic construct
  source 1..110: mol_type = other DNA
tccctgacctaggcaaggaggcagtgaacaatcaagcaagttcatacggaattaggacctacaagtgctctctgggcagcatggcaggggcaggtgagagctcaggagtc

SEQ ID NO: 71773 - DNA, 110 bp, synthetic construct
  source 1..110: mol_type = other DNA
ttgttctaaagtgaaccagtcttttccgtggccacagataagaggaaggggacggcacggactgtgccgaatgagggtggtggcttcctgagctcgctctgatttgttac

SEQ ID NO: 71774 - DNA, 110 bp, synthetic construct
  source 1..110: mol_type = other DNA
tccccttcttttctcaaaatgctggtgggtttacccatcaattccaaatttggcgaaaaggctcccggctttgtgagagaactctggtttccctaggccgccttttttcc

SEQ ID NO: 71775 - DNA, 110 bp, synthetic construct
  source 1..110: mol_type = other DNA
gtgggcaccaggggacggggggcctttctgtgcaggtgctggagccacaggtgtgttggtcgtagcttcttggtagagcctcttccccacttatcttgggctcagtctat

SEQ ID NO: 71776 - DNA, 110 bp, synthetic construct
  source 1..110: mol_type = other DNA
aactgcttggccattggggaactcccgctacagatttattttcactaccatcacaggaggtgggcaaaacaggacgcactgtccccattttgcagcaagggatcactgag

SEQ ID NO: 71777 - DNA, 110 bp, synthetic construct
  source 1..110: mol_type = other DNA
ggaggtgggcaaaacaggacgcactgtccccattttgcagcaagggatcactgaggctgaggatggggaagccaggctcaggagttagcacagagcggcgaggctcattg

SEQ ID NO: 71778 - DNA, 110 bp, synthetic construct
  source 1..110: mol_type = other DNA
tttttcccatccaagtttatagaccccttgaattcataccaccccaataacgtctatgagtctatggcccaaaggcagatgcatcatgatatctaggttgggaagcatgc

SEQ ID NO: 71779 - DNA, 110 bp, synthetic construct
  source 1..110: mol_type = other DNA
atgagtctatggcccaaaggcagatgcatcatgatatctaggttgggaagcatgccagaggctgggaaagaagaatttctaaacaaaagcccagagtattcttgatctgt

SEQ ID NO: 71780 - DNA, 110 bp, synthetic construct
  source 1..110: mol_type = other DNA
atctgccgctaaaccacacgcgggcgcgttccctggaaggatttggttgtgcggggggcagaaagagatggtgtctgagccgtttattgaacatgccttaaaaggagacg

SEQ ID NO: 71781 - DNA, 110 bp, synthetic construct
  source 1..110: mol_type = other DNA
gggcagaaagagatggtgtctgagccgtttattgaacatgccttaaaaggagacgcaagaagcaagatgtgctcctgctggcaggagaccagttcctctcgaggtctgta

SEQ ID NO: 71782 - DNA, 110 bp, synthetic construct
  source 1..110: mol_type = other DNA
gccggcggggagctctatgctgcgacggccatggatttcccgggacgcgatcccgccatttaccgaagtctgggcatcttacctcctctgcgcactgcccagtacaactc

SEQ ID NO: 71783 - DNA, 110 bp, synthetic construct
  source 1..110: mol_type = other DNA
aatactactgtaatttatagactaattttaggcattttattgaatataactcaatgtattctaactcaacttctctataaacacagctccaggccagtcaagtgggaggc

SEQ ID NO: 71784 - DNA, 110 bp, synthetic construct
  source 1..110: mol_type = other DNA
ccaccaagcctgtggtattctgccacagtctcaacgaagacactatccaatgacattatatatatatgggcatcccacatctctacatacaattatgtataaagtagata

SEQ ID NO: 71785 - DNA, 110 bp, synthetic construct
  source 1..110: mol_type = other DNA
atttgctaggacaagtcacaggactcagccatggtcacactcctgactatgatttattacagcaaaaggatacaaagcaaaacgagtagaagggagaggccatggggtga

SEQ ID NO: 71786 - DNA, 110 bp, synthetic construct
  source 1..110: mol_type = other DNA
attacagcaaaaggatacaaagcaaaacgagtagaagggagaggccatggggtgagggaggaggcaactagcgcaagtttcgagcatcctcccccaggggagtcagacat

SEQ ID NO: 71787 - DNA, 110 bp, synthetic construct
  source 1..110: mol_type = other DNA
actggattcaggctgaacaagaatcagtattagaggaccaaacacactgatgaagatatttcaattttttaattagtatgactttgtgtttaaaaaactgctgactctgg

SEQ ID NO: 71788 - DNA, 110 bp, synthetic construct
  source 1..110: mol_type = other DNA
acactataatttgtgaatgcaaccactcatttccccagtatttttctggaaacagattcagctgttcagggcagcggcactgccctgcctggtacatctctcagtgtctg

SEQ ID NO: 71789 - DNA, 110 bp, synthetic construct
  source 1..110: mol_type = other DNA
ctcttactgcagatttggtaaatctcagctataaagcaatctggtgagagtgaaggggtggcgttgggatggtggtatgataatatgatgatagaatattgactatgtat

SEQ ID NO: 71790 - DNA, 110 bp, synthetic construct
  source 1..110: mol_type = other DNA
catctggaagcagggaaatcacgccgagtgtgttctcaggccacaaaagaatggaagtagaaatcagtcgcaggaaagtagctggaagattccctaagtatgtggaaatg

SEQ ID NO: 71791 - DNA, 110 bp, synthetic construct
  source 1..110: mol_type = other DNA
acttcttggcagtggatgcaaaggagccattttgaaatttctggaatgattatgtgacactgaagctctcttctgaatctcaagagagcaaattttattttgtatcattg

SEQ ID NO: 71792 - DNA, 110 bp, synthetic construct
  source 1..110: mol_type = other DNA
ttccggtttccatagaaggttccacgttcaggcccctgtcttcattggctgtacggttttcccagctcatttttcccctcaaagctcattttccccctcgcgtgtttatc

SEQ ID NO: 71793 - DNA, 110 bp, synthetic construct
  source 1..110: mol_type = other DNA
atggctctgcaaacacctgctgcaggcagtcactgccgagacagcagggaagcaatcctgccctcctggccctgggttccagggaccccatctccactgccctccgagct

SEQ ID NO: 71794 - DNA, 110 bp, synthetic construct
  source 1..110: mol_type = other DNA
tgccatattctcatctgaaggcttgattgagaagacggcttcccagagcccccaggaggactcacagctcagttccttgcagctgtagggctaagagttttaggctttgc

SEQ ID NO: 71795 - DNA, 110 bp, synthetic construct
  source 1..110: mol_type = other DNA
tgatgataactgtgtatgaacatttaaagcaaattcccacttccccacctcccaaaaacgccagaaacaacaacgggaaaacaataggagtaaaagcaaaccatcagaat

SEQ ID NO: 71796 - DNA, 110 bp, synthetic construct
  source 1..110: mol_type = other DNA
tagctggtttgaacgacgggactttgctggacatcaggatgttacaggtgtttttcttgaacatgaaaggctggcatgtgagtgctcagcctgcagatagaagctgcact

SEQ ID NO: 71797 - DNA, 110 bp, synthetic construct
  source 1..110: mol_type = other DNA
cttgaacatgaaaggctggcatgtgagtgctcagcctgcagatagaagctgcacttgcatctgacacgagtctgtttaatcagtgtctccatctagcgagcaggtgcatg

SEQ ID NO: 71798 - DNA, 110 bp, synthetic construct
  source 1..110: mol_type = other DNA
agggaacagacgctcccgagacccgagctcggaatagctgggcagccgtttagaccctgatggtgctgattcataagcctggaggtggtaccacggttagagcatctgca

SEQ ID NO: 71799 - DNA, 110 bp, synthetic construct
  source 1..110: mol_type = other DNA
ggccccgggacggtagaagcctgcagagctaacgttctctgcactcagagaacatctctggagatggaaggtctcacgtttcctgactatcacatgacttaacaagtatt

SEQ ID NO: 71800 - DNA, 110 bp, synthetic construct
  source 1..110: mol_type = other DNA
gaaatacattgagattcctgaaccacacatttagtgaaccagcaagcccttgttttacagactacgtgagacagtttcctttttgttttcttctgtagaggtgagctgaa

SEQ ID NO: 71801 - DNA, 110 bp, synthetic construct
  source 1..110: mol_type = other DNA
tacagactacgtgagacagtttcctttttgttttcttctgtagaggtgagctgaatggattgcaactaccttttccattgatttagtctactgagggatggaacgttcat

SEQ ID NO: 71802 - DNA, 110 bp, synthetic construct
  source 1..110: mol_type = other DNA
aaaaaaaaagatggaaagaccaaaacatggtatctttccaatgtcaaaataggtcaaaattctgtctgaaatacgtttcttgcttgaaatcaaatatgttcatctgtatg

SEQ ID NO: 71803 - DNA, 110 bp, synthetic construct
  source 1..110: mol_type = other DNA
gttggaagaatgaattagaagtatggacaaattgtgctgatctctacttgttcgtgttttttgccatggatcgcctcttggtttttaagacccaacttcttatactgcac

SEQ ID NO: 71804 - DNA, 110 bp, synthetic construct
  source 1..110: mol_type = other DNA
tggctccggtcgctgccgtggtgtgtgttccatccctggcccgggaacctttgcgtgccacggtgcagccaaaaaataactaaaagacttaaagattatttctcctcccg

SEQ ID NO: 71805 - DNA, 110 bp, synthetic construct
  source 1..110: mol_type = other DNA
ctgctgggtcttgtggcgtcttagagccacccctgccccgctccctcatggtcatggcgatacccacttatccggcttagcagctgctttgtcttatgcgtggagatggg

SEQ ID NO: 71806 - DNA, 110 bp, synthetic construct
  source 1..110: mol_type = other DNA
attcacatctgagtgtgtgttgctatgtattgaattgtgactttgggtaaagataaatcttgtttttaaactactgctccccgagataacccagtgttgcctagttatat

SEQ ID NO: 71807 - DNA, 110 bp, synthetic construct
  source 1..110: mol_type = other DNA
aatcttgtttttaaactactgctccccgagataacccagtgttgcctagttatataaagtcagttcaaacaaacacaactcttatttacatcgaggtttataatcttggg

SEQ ID NO: 71808 - DNA, 110 bp, synthetic construct
  source 1..110: mol_type = other DNA
ggggtgtcaggtgacactaagcacacggttcacgcagctggaccattctctgcacaagctcatatctactagcggcgacgtcacacacggttcagaggcgtctgtagagg

SEQ ID NO: 71809 - DNA, 110 bp, synthetic construct
  source 1..110: mol_type = other DNA
cctcatggaaatttaatagaatcattcataatttatgacattaaacaagaaactgcatgattttatgagtctttaaaaccagtgtggttgcttttgctctagtctgagct

SEQ ID NO: 71810 - DNA, 110 bp, synthetic construct
  source 1..110: mol_type = other DNA
ctctccagcttttaagagtctctcaggttaggtacccctgaatgttcccaacacttgtttcttcgtattttttaggttttgtggttttgaggaatgaagcccttcccctg

SEQ ID NO: 71811 - DNA, 110 bp, synthetic construct
  source 1..110: mol_type = other DNA
ccctaaaaagcaaacaatcatcatcatcatcagaaaaaaataacagaaaggaagcacaggactggtctgaagggaaaagacatttccacgcagggcgttcttctcaccta

SEQ ID NO: 71812 - DNA, 110 bp, synthetic construct
  source 1..110: mol_type = other DNA
gacttgacgcatggatctgcctggtcaagatgatttcggcagcagctacaggaatgaatcccacaaagggactaagtttaatcatccaatcccagactgtattgatttgg

SEQ ID NO: 71813 - DNA, 110 bp, synthetic construct
  source 1..110: mol_type = other DNA
ttcgggggtttctggttttccgttcagcatctggtggggctcgtgaggttggggatgaggccgaggttcagtccttttccaagtaagaaaagccaaggacccagaaggcg

SEQ ID NO: 71814 - DNA, 110 bp, synthetic construct
  source 1..110: mol_type = other DNA
ccccagtctgttaatcatatcctacgccatccacgctgtcacggctgagaatcgtatcacatatgtccccacttcgtaagctgggtggagcccttacaaggtccagttcc

SEQ ID NO: 71815 - DNA, 110 bp, synthetic construct
  source 1..110: mol_type = other DNA
ggtcggaaatctcaacacgataattcctcggcaggctcagggtttttgctgggcttcctttttaactcccaggccctagttcgtgtcacagcttcagccagatcacaacg

SEQ ID NO: 71816 - DNA, 110 bp, synthetic construct
  source 1..110: mol_type = other DNA
tcctttttaactcccaggccctagttcgtgtcacagcttcagccagatcacaacggacatgtccgacgtctctttgccgatttccaggctcagtcccaccgtcccggcag

SEQ ID NO: 71817 - DNA, 110 bp, synthetic construct
  source 1..110: mol_type = other DNA
ctctaaacccaccacaggccactctatggatgaagttgtgactgttgtgtgtcgccttatccagaagtctgaacacagaagacgctttcagtttactttatcacttgtcg

SEQ ID NO: 71818 - DNA, 110 bp, synthetic construct
  source 1..110: mol_type = other DNA
ccaatccttttgatccagagccttgaagctgtggttgcgagtgtgtgtgtgtgtatgtggctgagtgtgtgggggggtgagtgaggctgttgagtgtgcttgagtgtatg

SEQ ID NO: 71819 - DNA, 110 bp, synthetic construct
  source 1..110: mol_type = other DNA
cctacaaggatattcgtacgtattgcaagcgcatctagtgagcacacgcgacctgcggatggcttttcatcgaagagcctcatgaaggccggttaatgagcgtgagagct

SEQ ID NO: 71820 - DNA, 110 bp, synthetic construct
  source 1..110: mol_type = other DNA
cggatggcttttcatcgaagagcctcatgaaggccggttaatgagcgtgagagcttccctcctaacacaccctcagaggcgcaaacccttctctcctaatccgtcctcca

SEQ ID NO: 71821 - DNA, 110 bp, synthetic construct
  source 1..110: mol_type = other DNA
tcgggaggctcctcagcttctgcgaatgtgcttggagagtccccccccccagggctttatggaccactcgcagtttacaccctcgccaggatacagaacgtcacagttta

SEQ ID NO: 71822 - DNA, 110 bp, synthetic construct
  source 1..110: mol_type = other DNA
cacatgaataaatatttattttctccatgtcacaatttgtatacttttaatcgggtgttgcagatggcaatgaggaaacgaagccagatctatgaccacttcaacagtgt

SEQ ID NO: 71823 - DNA, 110 bp, synthetic construct; identical to SEQ ID NO: 71822
  source 1..110: mol_type = other DNA

SEQ ID NO: 71824 - DNA, 110 bp, synthetic construct
  source 1..110: mol_type = other DNA
ctcggggaatctctgcatccacacctcctgtgtgtccataggtagaagctccctctgtggtgcgatgggatggcagtgtcttgggagccctgggacgcaggttcaatccc

SEQ ID NO: 71825 - DNA, 110 bp, synthetic construct
  source 1..110: mol_type = other DNA
caggctgcatgcatcccacccacccatccaagctcatgggatgcgtcccccatttgtttggacagggtttgtgaaatgaaacctccgctccccctgggcctcccctaaac

SEQ ID NO: 71826 - DNA, 110 bp, synthetic construct
  source 1..110: mol_type = other DNA
cataaatgatgggctattggggaaagtaagtgacccatcgctattttaaaatcctactttcaaacacaactctgaaagaggaaaaggccactattacgatgttagctgga

SEQ ID NO: 71827 - DNA, 110 bp, synthetic construct
  source 1..110: mol_type = other DNA
tttcatttttgaggggcaaacagtgtgtttttgacgggtgttaacttttattggcatttggcatttgtctgggggggaggggccttgggcatttaccccactgccaggtg

SEQ ID NO: 71828 - DNA, 110 bp, synthetic construct
  source 1..110: mol_type = other DNA
tcattagaaaacaataggtgtttcattgagggaccacggacacacaaaaagctgaacgtattgaatatatacaactcgatgggtttggaagtatgtaaatagccctcacc

SEQ ID NO: 71829 - DNA, 110 bp, synthetic construct
  source 1..110: mol_type = other DNA
tgggcgttctctgctctcacactgtgtccgtgccaaatgccgtccctgcgacccggggttctctagagctcgtttcttttatacatatatattcgtatatatatatattc

SEQ ID NO: 71830 - DNA, 110 bp, synthetic construct
  source 1..110: mol_type = other DNA
gcaaaggcagtaggcaaatggtaccagcacgttcggtcgggcagggaggttacaatgaaacacaactgtactcgttggacctctccctgctttgaaaatgttctagaatg

SEQ ID NO: 71831 - DNA, 110 bp, synthetic construct
  source 1..110: mol_type = other DNA
ccccttgtgcccagcagctctcggaacccacttcgcggctggaaaccagactgcacccgcgtccgggcatcagggtgggagcgccgtgccctggcggtgctgccttctgg

SEQ ID NO: 71832 - DNA, 110 bp, synthetic construct
  source 1..110: mol_type = other DNA
cccgcgtccgggcatcagggtgggagcgccgtgccctggcggtgctgccttctggaagatttgcttcctcaccacaaacctctgaattggcatttcctacaggaggctta

SEQ ID NO: 71833 - DNA, 110 bp, synthetic construct
  source 1..110: mol_type = other DNA
tctgcgccccaggaagccactccagaactgcagggccctcggtcaggacagtcagaagcaccccagctccgtgtgacctcgaggcctcaaggtaccaaattgtacccact

SEQ ID NO: 71834 - DNA, 110 bp, synthetic construct
  source 1..110: mol_type = other DNA
tgagacagaagttccgaggacatggtcgcgggagacacttaggcttcttttggtacaagcttcagagcacctggcctcagagggcctccgtcacagcagacccgtcaccc

SEQ ID NO: 71835 - DNA, 110 bp, synthetic construct
  source 1..110: mol_type = other DNA
ggaggagacgtgcacaccttgccacacccagggcgggacacagcttctcacggagactgggggaaggggccagaaatggaagaagggcttttttctacttggttttttca

SEQ ID NO: 71836 - DNA, 110 bp, synthetic construct
  source 1..110: mol_type = other DNA
gggaaatccaggctgcaagcttgctggaagcttctctgccagcaggtgaagggacccgctggtgtccaggcccctgggctggcgctgatcctagaggaggcaagtccttt

SEQ ID NO: 71837 - DNA, 110 bp, synthetic construct
  source 1..110: mol_type = other DNA
ccgctggtgtccaggcccctgggctggcgctgatcctagaggaggcaagtcctttggaggagcgtggctggccgtccaggtggcccccctgtctgctgcatcaggtcccc

SEQ ID NO: 71838 - DNA, 110 bp, synthetic construct
  source 1..110: mol_type = other DNA
cttctgcattgcagtgttttagtcaagaatagaaaggaaaactgctcactggatctcagcccgaaggcgctgggacgggggggtctgtaaaccactctgccgggggagcc

SEQ ID NO: 71839 - DNA, 110 bp, synthetic construct
  source 1..110: mol_type = other DNA
tcagtatgtcttccactcggataaactagaggacgcgctgtttgacggaccctgtggccctaaggcccccgtcacaggcagggcatctgacgagggattgcatctgggat

SEQ ID NO: 71840 - DNA, 110 bp, synthetic construct
  source 1..110: mol_type = other DNA
gagggaacgtttgcaaagcgcctgtctgataaaggacttggatccggaatacacgaagaactccccaaactcaatcacggcatagccacgcgatatactaaacaaacaac

SEQ ID NO: 71841 - DNA, 110 bp, synthetic construct
  source 1..110: mol_type = other DNA
ccgtgaccttacgtgaccttacgtgaccctggatgaccctgatgggtagtgcatggccctggatggcccttcggtaccctgtttgtctgtgggtgaccaggctgtaccag

SEQ ID NO: 71842 - DNA, 110 bp, synthetic construct
  source 1..110: mol_type = other DNA
ccctggaaccgggtccacctccaggcccctccctccccggagggggagggatggcttgttgccctggcaaccggccccgcctttaactgctgcccaaatctcattaacat

SEQ ID NO: 71843 - DNA, 110 bp, synthetic construct
  source 1..110: mol_type = other DNA
gccaccagcaaccacctaacgccatgactccaatgtggagccatcgtacctgcgtcagctcctggggctggtgacaaatgaccacggtctggccctttaaaacagcagga

SEQ ID NO: 71844 - DNA, 110 bp, synthetic construct
  source 1..110: mol_type = other DNA
tcctctcgtcccctctcagctttgctggattggagatgtctttattttgccccgtttacccaccgtgtttgccggtgtgggaacctggccggtggctgctttccttgggc

SEQ ID NO: 71845 - DNA, 110 bp, synthetic construct
  source 1..110: mol_type = other DNA
gacgggagtccagggcgcctgcggcttcccgtccccagggcgccgggtcctgcactatctctggtcactacctcgcatttatggatgtcggggttacatctgcatttggc

SEQ ID NO: 71846 - DNA, 110 bp, synthetic construct
  source 1..110: mol_type = other DNA
acacaagttacttgagggtggagatctgggagtagaattgctgagtcctgggagaagagcttcttcagctttgctagctaacctcacactgttttccaaagaggttctgc

SEQ ID NO: 71847 - DNA, 110 bp, synthetic construct
  source 1..110: mol_type = other DNA
gtactccaataattccaaatgcaccattctccattctacatgttttctggatatttatgtgattgtcaagctgttctagtaaatgacccaccttgccatatttttgtttt

SEQ ID NO: 71848 - DNA, 110 bp, synthetic construct
  source 1..110: mol_type = other DNA
tgttaaggggcacctatgaaaagcccacagtgaatatcacataaaaaggacaaagcctgaattctttccctcaagatcaggcgtattactggctctgttactggctccaa

SEQ ID NO: 71849 - DNA, 110 bp, synthetic construct
  source 1..110: mol_type = other DNA
cctgaattctttccctcaagatcaggcgtattactggctctgttactggctccaaattcaaagtcccaggggagatgagtcagccaagagtgggttacatgcctgctctc

SEQ ID NO: 71850 - DNA, 110 bp, synthetic construct
  source 1..110: mol_type = other DNA
ggctctcctcccgccccctctttgtctctggcgcagggcagtctgcgctccgacgcttgtccctagttcgctcctccgtccagtcagtttcgccctctctcacgcttggc

SEQ ID NO: 71851 - DNA, 110 bp, synthetic construct
  source 1..110: mol_type = other DNA
aaaagaatattaaaaatgtctctttcctgcttttagtctgagataatcctctcgcctggacatttgtaggacctacttgttctctggcacaccttcctgagtaggaaacg

SEQ ID NO: 71852 - DNA, 110 bp, synthetic construct
  source 1..110: mol_type = other DNA
ccctccagcctcaagcactgaccttgccacctgcctaccctatgggtccagagtatgagtgcgcgcactatttggggccctgaagcagctacatcacttccttcaactaa

SEQ ID NO: 71853 - DNA, 110 bp, synthetic construct
  source 1..110: mol_type = other DNA
gggcaagaaactgtcagggcccagacaggatgccaagtcttatccctgactcccgaacaggctggtagcttaggttagaggctgtcaaatcctaaagtataccctcctat

SEQ ID NO: 71854 - DNA, 110 bp, synthetic construct
  source 1..110: mol_type = other DNA
gagcaagttttgtatcaaagatgtcaatcatatctcttatctccagcaatggaatcctcctccctccactgggagtgcactgggcaggaagttctgtgttatccctggga

SEQ ID NO: 71855 - DNA, 110 bp, synthetic construct
  source 1..110: mol_type = other DNA
gatgcaaacatctcacctgccacttagcactggagagagtagatggtccccaccactctcagctgagggagggaggactggggaaaagaatcaatattttcccccagtat

SEQ ID NO: 71856 - DNA, 110 bp, synthetic construct
  source 1..110: mol_type = other DNA
ctctcagctgagggagggaggactggggaaaagaatcaatattttcccccagtatcctgtgaactgcactggaagaaagccattgagcagccttaaatgacactttgagg

SEQ ID NO: 71857 - DNA, 110 bp, synthetic construct
  source 1..110: mol_type = other DNA
cacaaaaccatattatgtaggcaagatgagggccaccagccaatattaacaacaacatatcagctccatcttccaactataaaagttggcaagaggcgttgtaaagtttt

SEQ ID NO: 71858 - DNA, 110 bp, synthetic construct
  source 1..110: mol_type = other DNA
gtcaggtttgcaattgttcctgaaaactggctctagattctgcatccgatgccggtcggccattgggatgcaagtatttacataaataagagactgtgtcatagtcaatg

SEQ ID NO: 71859 - DNA, 110 bp, synthetic construct
  source 1..110: mol_type = other DNA
aagagaatgtatacaaagtacttagaacagggctttgggacattgtaagcatactcaagtgtttgttattatgactatgcttcttcactctatatgcatagtatttatta

SEQ ID NO: 71860 - DNA, 110 bp, synthetic construct
  source 1..110: mol_type = other DNA
atataagaggagtgagttctagagatctgcccctcattaacaatgtggtattgggcacttcgaaatgtattaagagaggagaactcatgttgttttttatgacaaagaaa

SEQ ID NO: 71861 - DNA, 110 bp, synthetic construct
  source 1..110: mol_type = other DNA
gtctcaaggttgtaacttgtaactgtgcaaccatttcagacccccatcaatccttgcttaacaaacctgcatacttcttgccagctccagtcctaattcttgacaaacat

SEQ ID NO: 71862 - DNA, 110 bp, synthetic construct
  source 1..110: mol_type = other DNA
ctagtactttctcttgttcccatgaaattcaacactcttaacttcatgcccttaaaaaatggaaaggaggcttatggatgggtatcatcaacaaagaaggacctggaacc

SEQ ID NO: 71863 - DNA, 110 bp, synthetic construct
  source 1..110: mol_type = other DNA
ccttgacttctctcccctttcctgtgtttcaggactcagaaaatggcttgtcatagacagtttattttttattaaaaaaacaaagccattttttttaaagtgttagtatt

SEQ ID NO: 71864 - DNA, 110 bp, synthetic construct
  source 1..110: mol_type = other DNA
aagaggggcagaactgttactaaaagtgttattttttcaacactgggcacaagcacttaaagtcacagctatctaaagattactgagttgtttaataaagaggttgaaga

SEQ ID NO: 71865 - DNA, 110 bp, synthetic construct
  source 1..110: mol_type = other DNA
cttaaagtcacagctatctaaagattactgagttgtttaataaagaggttgaagacgctcaggctaaggacctggcagaaagtagttagctctatttttacagaggcagg

SEQ ID NO: 71866 - DNA, 110 bp, synthetic construct
  source 1..110: mol_type = other DNA
ccctagggttgctgccatcattgccagagtgtggaggctgggaatcaaagccacggcctggcctgagctgctcctatcaagagcatgctctttgaactgtgtttcagtga

SEQ ID NO: 71867 - DNA, 110 bp, synthetic construct
  source 1..110: mol_type = other DNA
agcctggccaaaccaaagactgccacccagcttcagcctgaactctacgctgttactttcatggcttacttatgtcactgcattcacaatgaatttacatatatgtatac

SEQ ID NO: 71868 - DNA, 110 bp, synthetic construct
  source 1..110: mol_type = other DNA
ctagtttatagtttctcaggaaatttggtaactattctgcgatgccattgtctttaccagcccagggtagtagcatggcaaagcagtccctgagatcattcaaatacatc

SEQ ID NO: 71869 - DNA, 110 bp, synthetic construct
  source 1..110: mol_type = other DNA
cactgtaaacggcaggctgggatccgaatcgttccttcagttttacagatgaggaaattaaatgtcgtttcttagaatagtaatcatccttgtatcgttattagtgaaag

SEQ ID NO: 71870 - DNA, 110 bp, synthetic construct
  source 1..110: mol_type = other DNA
gctgggatccgaatcgttccttcagttttacagatgaggaaattaaatgtcgtttcttagaatagtaatcatccttgtatcgttattagtgaaagtgatgtattttgagt

SEQ ID NO: 71871 - DNA, 110 bp, synthetic construct
  source 1..110: mol_type = other DNA
ggatggtgaagggaccagcagaccgagccaggaatttttttcaggaaatagtttggggtccaccctagcccatgaacaaatcgcagctttatgctgcagagagggctcca

SEQ ID NO: 71872 - DNA, 110 bp, synthetic construct
  source 1..110: mol_type = other DNA
gggtccaccctagcccatgaacaaatcgcagctttatgctgcagagagggctccaggtgatttcatcctggaagcttttcaacgtccaccaacccctgaaaaaattccag

SEQ ID NO: 71873 - DNA, 110 bp, synthetic construct
  source 1..110: mol_type = other DNA
cccacaatgccaaatactcctaaatccaccccagagttcaactctaggcaatgaccactcttttcttttcttttagtgtatgagcttttttaaagtagtgtttcaaaaca

SEQ ID NO: 71874 - DNA, 110 bp, synthetic construct
  source 1..110: mol_type = other DNA
agtcccatctccatttcacctcactcagagagcgggggcccaggatatatttcgcaattttctacctctttgtgctctctctcttatctggctttgggttaaacctccag

SEQ ID NO: 71875 - DNA, 110 bp, synthetic construct
  source 1..110: mol_type = other DNA
cctcccctccttattaactgatttactcattcattcatttattcatttaatatttatttcacttcctataccatgactgtatttatcaaaatcagagcttccccctttta

SEQ ID NO: 71876 - DNA, 110 bp, synthetic construct
  source 1..110: mol_type = other DNA
cggttaggtgctagaaaaacctaaccgttcacttgagtgagtagctagaggttcctggtttccaggagtgagggagataaaggagatgtggttggtcctgaaaataactt

SEQ ID NO: 71877 - DNA, 110 bp, synthetic construct
  source 1..110: mol_type = other DNA
aaatcaaagcagggaattagaaaaaatggaaacattgaatatgtaattagaacgttgggagaacttggtttgaaatgaagaaagctctgtgaaagtggcttacgggttat

SEQ ID NO: 71878 - DNA, 110 bp, synthetic construct
  source 1..110: mol_type = other DNA
taagacccacaattgcttcttccatgtcagttaagtgacagttgattaggctacggcattagtttttctagttgtccctcaaagaaacactattcaaactcattggagga

SEQ ID NO: 71879 - DNA, 110 bp, synthetic construct
  source 1..110: mol_type = other DNA
aaataaatcctttatcatgacatggctattcattcatttaaacacttatgaacgggattaaaagcactgagctagatgctagaggcacaaaattgaactgctacagacac

SEQ ID NO: 71880 - DNA, 110 bp, synthetic construct
  source 1..110: mol_type = other DNA
aggtatttgtttcatataagacatgtaataagaaaactggtcttctggcaccattcataaataaattaaggattgaaaagggaggaaaacaagatcttagtttatggaca

SEQ ID NO: 71881 - DNA, 110 bp, synthetic construct; identical to SEQ ID NO: 71880
  source 1..110: mol_type = other DNA

SEQ ID NO: 71882 - DNA, 110 bp, synthetic construct
  source 1..110: mol_type = other DNA
catcatgtcagagagactcttgtcaagatcacctctgtcttccacattaataaatataatggttcactctcagcccttgccttaattgagggcctttactatggttgatc

SEQ ID NO: 71883 - DNA, 110 bp, synthetic construct
  source 1..110: mol_type = other DNA
ctttgaactttgtagaggaaatcatctttccaaacaactatacaacacagcactgcagttttcacttactgttaagaatacatactcccatgagaaagcatttcacattt

SEQ ID NO: 71884 - DNA, 110 bp, synthetic construct
  source 1..110: mol_type = other DNA
ctctcatgtaataactgtttgagagagctgctgtgtaatcaggaacatggattcttaagctttttaaatgctgtaagaactttgtgaaatagtgcttgtaatgatcacta

SEQ ID NO: 71885 - DNA, 110 bp, synthetic construct
  source 1..110: mol_type = other DNA
taacatgtatagatttatgtaaaaaccgtcataatcaggattcagaacaattccgtcacccctcaaaaattgtttatgtgggctctttatagccacacccttcttccatt

SEQ ID NO: 71886 - DNA, 110 bp, synthetic construct; identical to SEQ ID NO: 71885
  source 1..110: mol_type = other DNA

SEQ ID NO: 71887 - DNA, 110 bp, synthetic construct
  source 1..110: mol_type = other DNA
gaaaggcagtgataaatacaaacatttaagacagggtttagctcttaaaagatgatcattaaataggagctgctgtttatttcatacactcacctgtactctgtcgccaa

SEQ ID NO: 71888 - DNA, 110 bp, synthetic construct
  source 1..110: mol_type = other DNA
gtggaggaaagaatatttggagtataagatgaggcaagttatttatgtcatcaccagcctctttgagctccatggtaatatttgggaagatacagtacaggactgaaggg

SEQ ID NO: 71889 - DNA, 110 bp, synthetic construct
  source 1..110: mol_type = other DNA
agcctctttgagctccatggtaatatttgggaagatacagtacaggactgaaggggtaccataaagaaagaaaagattatagaacaaacgtgggctatacactggaatct

SEQ ID NO: 71890 - DNA, 110 bp, synthetic construct
  source 1..110: mol_type = other DNA
ctctgttttgtgtttatatttattttctgtcttctcccactagaatgcaagctacatttgggtaatgttatttcctgcagctttaaaatggtgcctggcacatggtaggt

SEQ ID NO: 71891 - DNA, 110 bp, synthetic construct
  source 1..110: mol_type = other DNA
ttagaatccacatattcatgaaacaggctgacatctggttataaatttgacataaatttgcaaacatcgtccactaagctccttatgggctctagtacaaaaagatactc

SEQ ID NO: 71892 - DNA, 110 bp, synthetic construct
  source 1..110: mol_type = other DNA
gagttgagtttggccacagaatctgcacatttaagcactgcactgttggagagtcttcactgcacagcactgtgtggctggatctccccgtacctggaaatcctacaaag

SEQ ID NO: 71893 - DNA, 110 bp, synthetic construct
  source 1..110: mol_type = other DNA
ttcactgcacagcactgtgtggctggatctccccgtacctggaaatcctacaaagcggggcaccattgtgatgtgcacatgttcctgttaattctgtgcaaagtgaggac

SEQ ID NO: 71894 - DNA, 110 bp, synthetic construct
  source 1..110: mol_type = other DNA
tgtaacaaagagatgaagaattacagcatcgagtacataaatgacaattagtacgtgtgggcattcagtgttgcacatgtatgtgtatttacgggtgatggtacatgtcc

SEQ ID NO: 71895 - DNA, 110 bp, synthetic construct
  source 1..110: mol_type = other DNA
gaaaccctgtattttatgtggctgttctgtttatgcaccatgccaagcagctttaaaaatgatgaccttctgagatacaaaaataatacttcagattttaatattagatc

SEQ ID NO: 71896 - DNA, 110 bp, synthetic construct
  source 1..110: mol_type = other DNA
tcaacttccaggcatgtgaacgagcaagacttcacatgacaccaggctccagattttgtgctgcttccattatctccagctggagagaccagccatctttgctgagccct

SEQ ID NO: 71897 - DNA, 110 bp, synthetic construct
  source 1..110: mol_type = other DNA
ttgtgctgcttccattatctccagctggagagaccagccatctttgctgagccctacctaaatttcaggtgtgagcaaaataaaagctatcattgttttagagctattga

SEQ ID NO: 71898 - DNA, 110 bp, synthetic construct
  source 1..110: mol_type = other DNA
gtttctttgattcatggagacacctcccagcagcttctggagagctttctcctgcaggatcccttatgcaatggaaagtttctcctccagcaggtagattgagtctgttt

SEQ ID NO: 71899 - DNA, 110 bp, synthetic construct
  source 1..110: mol_type = other DNA
gaatcagtacagacatcctttcttcctctccacttacacctgagggtttaagaaatatcaacctcagagcagtctggactcttggaatagaaatcttttctttaaaatca

SEQ ID NO: 71900 - DNA, 110 bp, synthetic construct
  source 1..110: mol_type = other DNA
tatcaacctcagagcagtctggactcttggaatagaaatcttttctttaaaatcaaacaatcattgcctgttacataaaaatgtggcagagtaactttctagactaactt

SEQ ID NO: 71901 - DNA, 110 bp, synthetic construct
  source 1..110: mol_type = other DNA
gaggaggtctggaaaggaaagtggagcccagagacagaaccaaaatttaccaagtaactgttcaccaatttagcacaatttaagagcaaagcatagtttcaaggtacaaa

SEQ ID NO: 71902 - DNA, 110 bp, synthetic construct
  source 1..110: mol_type = other DNA
gaggaaggcagaatacatgctacttatgttgctagtagctattctcagcacatctttcctactctgtgcacgttttattgtcactacctgtgctgtccttatggtagcca

SEQ ID NO: 71903 - DNA, 110 bp, synthetic construct
  source 1..110: mol_type = other DNA
catcttcttatttttgagtggtctattttatgaggcaaagatgtgatgtgtcatatattacaacatgaagagagagagtgagagagagccagtgtgtatgtgtataattg

SEQ ID NO: 71904 - DNA, 110 bp, synthetic construct
  source 1..110: mol_type = other DNA
tgaatgcaaacatgtatcaacagttgaatgtgccagctgttccctaggtattacgcagggggcgactcccaacttaaatcaaaaggaggggtgtcacagcagaggggaca

SEQ ID NO: 71905 - DNA, 110 bp, synthetic construct
  source 1..110: mol_type = other DNA
atatataaacatttggattgcatgtgtctagacactaatggtgattttattttgtctctttccagtcatttgtctagtgggattaggcctggtggtcttcttcttcagtt

SEQ ID NO: 71906 - DNA, 110 bp, synthetic construct
  source 1..110: mol_type = other DNA
ctctttccagtcatttgtctagtgggattaggcctggtggtcttcttcttcagttttctactttcaatatttcgttccaagtaccatggctatccttacaggtaatatcg

SEQ ID NO: 71907 - DNA, 110 bp, synthetic construct
  source 1..110: mol_type = other DNA
aacagtgagtatctctataaaaagaccaacattttaagacaggttttaaaaaaaatttaagctcaactgataggaaggaaatatactagcatggactgtgtcaaactcta

SEQ ID NO: 71908 - DNA, 110 bp, synthetic construct
  source 1..110: mol_type = other DNA
aggtgcaatgtacactcacgcagagggaatctaagctcagctccttgaaatcagtagagaatttgtagaattgttttaaaacctccaggaacaggtctgaagtactcaat

SEQ ID NO: 71909 - DNA, 110 bp, synthetic construct
  source 1..110: mol_type = other DNA
acaaatacctctgtcacaccataatgtaaggctgtgggcaggcctggtacctggctaaggcaaagctgttttgatgatatacttggtttgggtttagtgaatcaggctaa

SEQ ID NO: 71910 - DNA, 110 bp, synthetic construct
  source 1..110: mol_type = other DNA
tttaatctccaaagattattattccaactttaagtagcttatgtggtttacctccataggtcagatcaaaaagtcagcagtaatttggagaaagaccctaccattgtgtt

SEQ ID NO: 71911 - DNA, 110 bp, synthetic construct
  source 1..110: mol_type = other DNA
tcatcacctagatttaggctgattagaagcaagaccctcaggcagcagcttttatgtatggaaatatatacagttttgtggggccccaagctgaagtcctgctggcgacc

SEQ ID NO: 71912 - DNA, 110 bp, synthetic construct
  source 1..110: mol_type = other DNA
gtatggaaatatatacagttttgtggggccccaagctgaagtcctgctggcgaccaaagccagatgatgagaatgcaaagatggtgtccacctgcctaggttctctgagg

SEQ ID NO: 71913 - DNA, 110 bp, synthetic construct
  source 1..110: mol_type = other DNA
accctgagccatgacgggatgccaggcgggccctgtttaaaagctttcatgtgctgtaatttcaacagcttgttttaaccttagagtgagggttccacccagagaagtgg

SEQ ID NO: 71914 - DNA, 110 bp, synthetic construct
  source 1..110: mol_type = other DNA
cagaccccctgactccagccttgacaacttcgaaatgatctacggagggaaaagaatgcaggttccctaatccttatcaatccttagccctgtttttttgagctaaatct

SEQ ID NO: 71915 - DNA, 110 bp, synthetic construct
  source 1..110: mol_type = other DNA
atgcaggttccctaatccttatcaatccttagccctgtttttttgagctaaatctataaaacccttgtatcccctctcaagggaggacacaggcctgctgtggcctcctt

SEQ ID NO: 71916 - DNA, 110 bp, synthetic construct
  source 1..110: mol_type = other DNA
ggactccatgcctctccctctaccttctacctagctgccttcctcttgtttaaacttcgattgattgactagtgcctatgttattgaactcaagacctctgtctgacctg

SEQ ID NO: 71917 - DNA, 110 bp, synthetic construct
  source 1..110: mol_type = other DNA
tcttcttttagacacactgctatgctatagtcttagaaaacaagtggggagaaggaaaaggagttgtgccaatgacatggaatgagcacaatatattgtgtcatgtgtat

SEQ ID NO: 71918 - DNA, 110 bp, synthetic construct
  source 1..110: mol_type = other DNA
aacaattttattttgctcggattcttaattcaagagtaaagacaaagcataaccgtaatgacttgtctctgtaccctgatgactgagcttctgataaaacttgattccta

SEQ ID NO: 71919 - DNA, 110 bp, synthetic construct
  source 1..110: mol_type = other DNA
tgaagcctctttttcaaagtagcagataagatgatttgaagagataaggtagaatacagtagctgacattttgtgaaattctttctggagcccagtattttgagattttt

SEQ ID NO: 71920 - DNA, 110 bp, synthetic construct
  source 1..110: mol_type = other DNA
actgatactatggaatctaagatagaaaaattgaccaagagcccaattatgcttatagaaactctagcaacagaaagatgatgttgcatcacccccaaattttggaagac

SEQ ID NO: 71921 - DNA, 110 bp, synthetic construct
  source 1..110: mol_type = other DNA
tagaaactctagcaacagaaagatgatgttgcatcacccccaaattttggaagacagctatgctcatcactataccaccaatgccactgcctcatacccaaactaggaaa

SEQ ID NO: 71922 - DNA, 110 bp, synthetic construct
  source 1..110: mol_type = other DNA
gtccaaaaaattctaactacatactgtgtggttccaactatacgatgttctggaaaaggcaaaactatggccagagtaaaaaaaagttaggtgattgccagggtttagga

SEQ ID NO: 71923 - DNA, 110 bp, synthetic construct
  source 1..110: mol_type = other DNA
tactgtcatgatttcagttcttttaaatgtctcaagctttatttcatgaaccaacatacaatctgtctttgtgaatatttcatgtgcctttggaagtaacgtgtaggagt

SEQ ID NO: 71924 - DNA, 110 bp, synthetic construct
  source 1..110: mol_type = other DNA
actgaattgtgaagaatatagtcagaggatctggaaaagattcagagcaacagtgctgaaacaaaaagataattggagttttagaaaaggctgatgcaaagaagaaacac

SEQ ID NO: 71925 - DNA, 110 bp, synthetic construct
  source 1..110: mol_type = other DNA
cactgtaccacaataggaactgcacatattttctcacatagggaagacgtcaccttgatatttatgcctttcttttctcttactgttcctcctagttctaccttgatagg

SEQ ID NO: 71926 - DNA, 110 bp, synthetic construct
  source 1..110: mol_type = other DNA
tgatatttatgcctttcttttctcttactgttcctcctagttctaccttgatagggcccaagggagctaaggaaatatgaaagtttccaggtgtccctttccaaaactgt

SEQ ID NO: 71927 - DNA, 110 bp, synthetic construct
  source 1..110: mol_type = other DNA
aacacaatgcctattttataataaagtgctgaatatctcacataattgaaaaattataagagggaccatcataagtcagagtgatgaggaaccactgaaggaagagagga

SEQ ID NO: 71928 - DNA, 110 bp, synthetic construct; identical to SEQ ID NO: 71927
  source 1..110: mol_type = other DNA

SEQ ID NO: 71929 - DNA, 110 bp, synthetic construct
  source 1..110: mol_type = other DNA
ggttagttcacattaaggcaatattactctgtgtgactgtccacaaatgtgattttacagttgcccccttccaaattgaatacgtgaagttaactttaataatatacttt

SEQ ID NO: 71930 - DNA, 110 bp, synthetic construct
  source 1..110: mol_type = other DNA
actctgtgtgactgtccacaaatgtgattttacagttgcccccttccaaattgaatacgtgaagttaactttaataatatactttatttaatgcaacatatatttcagca

SEQ ID NO: 71931 - DNA, 110 bp, synthetic construct
  source 1..110: mol_type = other DNA
taaaatgtgagttagcactggcacatactgattaatgcattaccactgaggctctaaaaaggaaccgtcatggaattcctgtcgtggcgcagtggttaacgaatctgact

SEQ ID NO: 71932 - DNA, 110 bp, synthetic construct; identical to SEQ ID NO: 71931
  source 1..110: mol_type = other DNA

SEQ ID NO: 71933 - DNA, 110 bp, synthetic construct
  source 1..110: mol_type = other DNA
cacccctaatattggttgggtttgcttttgatctaaacaagtcttaccaggggttattgattgtattagtcccaaataactacattcagagcttcacttgtgccattctt

SEQ ID NO: 71934 - DNA, 110 bp, synthetic construct
  source 1..110: mol_type = other DNA
attgattgtattagtcccaaataactacattcagagcttcacttgtgccattctttttcctttctctatctcttggatttctgaactgaccgcattattgccttccttga

SEQ ID NO: 71935 - DNA, 110 bp, synthetic construct
  source 1..110: mol_type = other DNA
atcaccttccatgagtatctattcactcctagtgcctcccaatttactggccagaattcattcagctacccttctgcagcctgggatttcttgatcaattctcttttggc

SEQ ID NO: 71936 - DNA, 110 bp, synthetic construct
  source 1..110: mol_type = other DNA
attcattcagctacccttctgcagcctgggatttcttgatcaattctcttttggctttgctacatgtttcatagcattccccctcctctagactctgggccctagaatag

SEQ ID NO: 71937 - DNA, 110 bp, synthetic construct
  source 1..110: mol_type = other DNA
gagtgactctggcttgcgggcaccagattgaaacagatgtagcaaagtcatcctgaacactcctctttctcctgttctaactgcaaactccatctagccctctagcaacc

SEQ ID NO: 71938 - DNA, 110 bp, synthetic construct
  source 1..110: mol_type = other DNA
atgcagagtagtcataacacaatgactttggcctgagcaaggatgggctaaggaggccaggagggtgggtgaggctggagtctcagaaggtggtgtgcacagggcaaggg

SEQ ID NO: 71939 - DNA, 110 bp, synthetic construct
  source 1..110: mol_type = other DNA
gctgacagcacagcaagtccatctctggccagatcgcatcagctcatcaattccggggccagatgtatttaattctctggccgttcctgcccaccagcacccatcaccaa

SEQ ID NO: 71940 - DNA, 110 bp, synthetic construct
  source 1..110: mol_type = other DNA
gggccagatgtatttaattctctggccgttcctgcccaccagcacccatcaccaaagttagaagcttggaagtgacaagaggtcaaggcagattctagtcgacactcttg

SEQ ID NO: 71941 - DNA, 110 bp, synthetic construct
  source 1..110: mol_type = other DNA
agcagtgacagtgccagctctgaacccactgacccaccagagaaagcctataatttcttttttcccttaatctctgaaagggagccacgaagttgtcccaacctgtgaaa

SEQ ID NO: 71942 - DNA, 110 bp, synthetic construct
  source 1..110: mol_type = other DNA
ttttcttgcctgtgttcttgctgttgtatctaaatccaatattgtgaagctttacttctatgttttcttctaagagctttataattttagctcttacattgagatctatg

SEQ ID NO: 71943 - DNA, 110 bp, synthetic construct
  source 1..110: mol_type = other DNA
cctgcatcccagtgctcccaagacatgaccgatccagttgcaccacagggggctctccgagtagtccctttaaaacagccagtttttcccaaattatccaacaatatttt

SEQ ID NO: 71944 - DNA, 110 bp, synthetic construct
  source 1..110: mol_type = other DNA
gttcctggcacaaagctccagaaacacttgtcgtttcctaactgataagagtgcaggagcatcttttattctaatatttggtctttgacctggtccctgacacagagctc

SEQ ID NO: 71945 - DNA, 110 bp, synthetic construct
  source 1..110: mol_type = other DNA
cagtaaggtagtgcagggtactgctctaactttcttgcttttccccacttttgccaacacccagtcccgtcccctttagttccttgctttctattggtactactgattcc

SEQ ID NO: 71946 - DNA, 110 bp, synthetic construct
  source 1..110: mol_type = other DNA
aacacccagtcccgtcccctttagttccttgctttctattggtactactgattcctcagctccatttcagcctgtagagatggtccttagctttcctatgtctttttttt

SEQ ID NO: 71947 - DNA, 110 bp, synthetic construct
  source 1..110: mol_type = other DNA
gctgggccaggatggaacgtgggtcccagtgctgcccaggcgcccctgatcccattgtgccacagtgggagcttctcccttgtcgtttttgattagaagttgaggtatgg

SEQ ID NO: 71948 - DNA, 110 bp, synthetic construct
  source 1..110: mol_type = other DNA
tccttgaacagaaccgtctcagtgcgaacatgaggtgggcaaaggaaagcacccggactcttcgtggtcaccgtggctggaccagaggtctgcctgcagtggggggaaga

SEQ ID NO: 71949 - DNA, 110 bp, synthetic construct
  source 1..110: mol_type = other DNA
tgacaggcatctcaagcgtgtgtcccaggaagagtggctcatctttaggaagaatatgacagtgaccagcattatgtgactcgattctgagagagctgcacgccttgtta

SEQ ID NO: 71950 - DNA, 110 bp, synthetic construct
  source 1..110: mol_type = other DNA
atgacagtgaccagcattatgtgactcgattctgagagagctgcacgccttgttacctctcacataggccttgacctaagcccggcatttacgatgctgtcaagtttggt

SEQ ID NO: 71951 - DNA, 110 bp, synthetic construct
  source 1..110: mol_type = other DNA
cctgttgctggtgccttatcctgctcctctggcctctcctgacctccgccggctctagcaccttcctccatgaaaaggtgattgccctgctgggtgtcactgggacaaac

SEQ ID NO: 71952 - DNA, 110 bp, synthetic construct
  source 1..110: mol_type = other DNA
tagcaccttcctccatgaaaaggtgattgccctgctgggtgtcactgggacaaacagcttatatttagaacatccctcgaccagattggagtcaacgagcgctctcccgt

SEQ ID NO: 71953 - DNA, 110 bp, synthetic construct
  source 1..110: mol_type = other DNA
catcagtctacacgttagaacccagttacaatgttcctctgatctcagagggacagcagtgagtgatggcttgaagtgagatatcaaatgccctgctgaggagttgaagc

SEQ ID NO: 71954 - DNA, 110 bp, synthetic construct
  source 1..110: mol_type = other DNA
cattccttctccttaacaccccctttagaagcagagataggatcggaaaacattagttatttgcattcctagtacattggtttgaattgttttttttctgatgagtgtta

SEQ ID NO: 71955 - DNA, 110 bp, synthetic construct
  source 1..110: mol_type = other DNA
gttatttgcattcctagtacattggtttgaattgttttttttctgatgagtgttaagtgtgtgatagagattgtatcagggtaggctggattatgttgcacaacagaaac

SEQ ID NO: 71956 - DNA, 110 bp, synthetic construct
  source 1..110: mol_type = other DNA
aattgcccacagagggaccttgttcaatcttcccagcctgtactgacaatcttcccagcctgcctcacttcctatctcccataggagcttcctggatgctgcctgcacat

SEQ ID NO: 71957 - DNA, 110 bp, synthetic construct
  source 1..110: mol_type = other DNA
ccagactccagagttcaccctgatggtccagaaagggtgaccactgcaggaaggtggacataactaatgggtggtttccatcatagtcatggcaggaaagcagaagaaat

SEQ ID NO: 71958 - DNA, 110 bp, synthetic construct
  source 1..110: mol_type = other DNA
ctggcagttgacagtcaggctggtgtgtacaaaatgtcaaggcccagggtgatacaggcaggggctcctgagcctctgctgtgcagtgttctctcatcctccagacctgt

SEQ ID NO: 71959 - DNA, 110 bp, synthetic construct
  source 1..110: mol_type = other DNA
aggcaggggctcctgagcctctgctgtgcagtgttctctcatcctccagacctgtggacaaactttctgttccccagcccttcaaggcccagggtaaatcttcccagaat

SEQ ID NO: 71960 - DNA, 110 bp, synthetic construct
  source 1..110: mol_type = other DNA
cttaggtgtcaatcacaagtccagtttgtactatgcttttgattcactgactataaatcatatgttcccaggaacccttcctttggttcgattagtttgctagagttgct

SEQ ID NO: 71961 - DNA, 110 bp, synthetic construct
  source 1..110: mol_type = other DNA
ctggccttgaggtcactacttgacatccccttctttctgcaggtgtgtattccggctccagctgtctctgaggaccactaggtccctggcttcagggaaagggccaccct

SEQ ID NO: 71962 - DNA, 110 bp, synthetic construct
  source 1..110: mol_type = other DNA
ctccagctgtctctgaggaccactaggtccctggcttcagggaaagggccaccctcttgctagctggaagttaaggcagtgagaaagatcctggaaactgaggctaggag

SEQ ID NO: 71963 - DNA, 110 bp, synthetic construct; identical to SEQ ID NO: 71961
  source 1..110: mol_type = other DNA

SEQ ID NO: 71964 - DNA, 110 bp, synthetic construct; identical to SEQ ID NO: 71962
  source 1..110: mol_type = other DNA

SEQ ID NO: 71965 - DNA, 110 bp, synthetic construct
  source 1..110: mol_type = other DNA
aattctacctaattttacttcatttaaatagtcacgtgtggctagctgtcaccatattgaacaccagagatctagactagatgctttgtgaggattgggaccacaagggt

SEQ ID NO: 71966 - DNA, 110 bp, synthetic construct
  source 1..110: mol_type = other DNA
caacatttcagctgacaccttcatgatgagtagggaacagctaaggaaagagtaaaagtaggagtgttctagcaaagggcagactcggtatgtccaaaagcttgctgtgc

SEQ ID NO: 71967 - DNA, 110 bp, synthetic construct
  source 1..110: mol_type = other DNA
gaaagcaggatctgaggggatgcaatgagactacccttggagtgtggggcaaaaataaatatataaaaccatagcattggtggctggactcaaaagccagtgccaggtga

SEQ ID NO: 71968 - DNA, 110 bp, synthetic construct
  source 1..110: mol_type = other DNA
taaatatataaaaccatagcattggtggctggactcaaaagccagtgccaggtgaagaagaaaggctggagggctatccactggaacagcaagccaacaggaaaaggtaa

SEQ ID NO: 71969 - DNA, 110 bp, synthetic construct
  source 1..110: mol_type = other DNA
cagatgtcatagaaggccatggatacacagccaacttacaaataactgttggaactgctgtgaaataattagcatacactagctgggctaacggtttgaatcatgctaac

SEQ ID NO: 71970 - DNA, 110 bp, synthetic construct
  source 1..110: mol_type = other DNA
tgctgtgaaataattagcatacactagctgggctaacggtttgaatcatgctaactaatatgtgtggataaaaaaaaaaaaatccatgtgtcagctatgcccaaatctat

SEQ ID NO: 71971 - DNA, 110 bp, synthetic construct
  source 1..110: mol_type = other DNA
aagaggtgcttagctgtgcttgggaaatctcaattgctttcagattcgactttaggttacatttcatgacaggacttagaccttcttagaaatggtaaaccattaagagc

SEQ ID NO: 71972 - DNA, 110 bp, synthetic construct
  source 1..110: mol_type = other DNA
caccctccattactatcttcctgaagaaagcagggcagcaaagctgttcttccgcacaattcactccctaaaacaattatgtttgttccttgatgtcctgaagcaaaagt

SEQ ID NO: 71973 - DNA, 110 bp, synthetic construct
  source 1..110: mol_type = other DNA
tatgtctctaggatgcataaagatttttcatacggctctcctagtaatagttaccccttttgggaaccccctagagaaagattaatcatagttacatatgaggaaactga

SEQ ID NO: 71974 - DNA, 110 bp, synthetic construct
  source 1..110: mol_type = other DNA
acaagagccatattcgctgggctgcaggtggagcacacagctgccaggaaaagtcagacacctgctatgtccttgagtgccctctgatgggtggaaaaggagaacaatgg

SEQ ID NO: 71975 - DNA, 110 bp, synthetic construct
  source 1..110: mol_type = other DNA
ttcttgctgttttcttgaaagatcatctcagacagagagatgagcaagcttgcgcaccagctctccgactctaaggggtgagcggtactggcaaacacagagaaggaagt

SEQ ID NO: 71976 - DNA, 110 bp, synthetic construct
  source 1..110: mol_type = other DNA
acgtacaatccagggactgggaattagaaaagctgtccagtgatctacagctgcggtctcgtctgagaactgatgctttataggaagcagtgccttatcagtggccaggg

SEQ ID NO: 71977 - DNA, 110 bp, synthetic construct
  source 1..110: mol_type = other DNA
aaacgaacaatcaattaaactgaattgtacttttgttgtgattccaaccacacagagtcagtgaaggaaagaaaagaacattgagtcttgttgaatgcacaattgatatt

SEQ ID NO: 71978 - DNA, 110 bp, synthetic construct
  source 1..110: mol_type = other DNA
ccacacagaggacgggtctcgcttacatttgctgccgcgtgggcttgttcctcccagtctctggccccctccttgccttctgaaaagggtgagcttatcccagccctgtc

SEQ ID NO: 71979 - DNA, 110 bp, synthetic construct
  source 1..110: mol_type = other DNA
agtctctggccccctccttgccttctgaaaagggtgagcttatcccagccctgtcattgcccctgcagtgctgagcctgtaccaggcatgctctcaagagcctgtttctg

SEQ ID NO: 71980 - DNA, 110 bp, synthetic construct
  source 1..110: mol_type = other DNA
ggaggagccggggaacacgctctgccaggaactttctcctccgttttctggtcttaactccgctggacaccgaaacacaaaagagcggggaggttctgtcccgttgctaa

SEQ ID NO: 71981 - DNA, 110 bp, synthetic construct
  source 1..110: mol_type = other DNA
ctcttgcaggaaactggtacagattttcttttgtcacattctataggctaatgcaagttaaagtgccatcccaggtggaaggcatggggaaacaggctctaccacttcat

SEQ ID NO: 71982 - DNA, 110 bp, synthetic construct
  source 1..110: mol_type = other DNA
aacaagataaatgatatcgctggtctcaaaggacactctgatagggaaagagtctgagaactaagatcaagcttctgtgatcatatccaagtccagccataagcagtggt

SEQ ID NO: 71983 - DNA, 110 bp, synthetic construct
  source 1..110: mol_type = other DNA
gatggtggtgggatgggggtggggtcctggccttgaggaacaaagttatcgtaagagcgactttcctgtgcctttgagatgcagatgttctacttgttcttctccaggac

SEQ ID NO: 71984 - DNA, 110 bp, synthetic construct
  source 1..110: mol_type = other DNA
ggctttgcgccattttgggtcctcctccacgatgcctctctctcttcacaaggcatcttgtccttcactagtctagcttgagctcccttaacagcttggcatcagtttct

SEQ ID NO: 71985 - DNA, 110 bp, synthetic construct
  source 1..110: mol_type = other DNA
ccagggttcaaacccgcaccctcatggatactagtcacatttgtttccgttgcaccacaatgggaactccttacccgttttttaatcaattgcactctactataactgag

SEQ ID NO: 71986 - DNA, 110 bp, synthetic construct
  source 1..110: mol_type = other DNA
cacaatgggaactccttacccgttttttaatcaattgcactctactataactgagctcagacctaagatgattctgttcataccaagcattgtctacattcagtttttgg

SEQ ID NO: 71987 - DNA, 110 bp, synthetic construct; identical to SEQ ID NO: 71986
  source 1..110: mol_type = other DNA

SEQ ID NO: 71988 - DNA, 110 bp, synthetic construct; identical to SEQ ID NO: 71986
  source 1..110: mol_type = other DNA

SEQ ID NO: 71989 - DNA, 110 bp, synthetic construct
  source 1..110: mol_type = other DNA
gattcctagcagctccaagctacagctttgagcctcagattccttgggagcaaccacattcatttccagtttcttcagccccatgagctcaaacaaaaatctttcactga

SEQ ID NO: 71990 - DNA, 110 bp, synthetic construct
  source 1..110: mol_type = other DNA
actctaggggacaccaaggtatgagtcccttcaacccagctggatggggcccctgtgagatgtcctttggatttcagaagagggcactctgcccaattttcccagctgca

SEQ ID NO: 71991 - DNA, 110 bp, synthetic construct
  source 1..110: mol_type = other DNA
tggatgtgctctggggtcccctgctcatgtctgtcctgggcagggcttccagggcaatgtctgccttccttgcctggtggggtttgaggtctggtacatcctctcagatc

SEQ ID NO: 71992 - DNA, 110 bp, synthetic construct
  source 1..110: mol_type = other DNA
aatgtctgccttccttgcctggtggggtttgaggtctggtacatcctctcagatcttttaggatctctctgtgccacgtgtaagggtgggaggtcttgacgtttttttct

SEQ ID NO: 71993 - DNA, 110 bp, synthetic construct
  source 1..110: mol_type = other DNA
agccttttctttccgttatgatgccagtttactggatgtggcactactttctagaaaaaaatcccagcttgaaactcaagagattcaaaaacaaattctgagcatacgct

SEQ ID NO: 71994 - DNA, 110 bp, synthetic construct
  source 1..110: mol_type = other DNA
taagccacctctaaaaccctattccttaaccactgtattaaagcttaatatccctgaacttctttttatcagtcttttgacctcattattctgctagtcctatgcacttc

SEQ ID NO: 71995 - DNA, 110 bp, synthetic construct
  source 1..110: mol_type = other DNA
gaacttctttttatcagtcttttgacctcattattctgctagtcctatgcacttccctgatttctgcctgtcctcctatgactccatgatctattacttcagctaccttt

SEQ ID NO: 71996 - DNA, 110 bp, synthetic construct; identical to SEQ ID NO: 71994
  source 1..110: mol_type = other DNA

SEQ ID NO: 71997 - DNA, 110 bp, synthetic construct; identical to SEQ ID NO: 71995
  source 1..110: mol_type = other DNA

SEQ ID NO: 71998 - DNA, 110 bp, synthetic construct
  source 1..110: mol_type = other DNA
taaccagaggcctgaaggaaaggaaatgtgagtacttgggttaagctctgaacgcggctctgacagctcttcagcacctctggggtgttataaataggaattctatggaa

SEQ ID NO: 71999 - DNA, 110 bp, synthetic construct
  source 1..110: mol_type = other DNA
aaagacatttgagctcaatctgacagggtgagccaagctttaccaggtgtgataaggagggaagggattcttaatagcagaaagagaaatatgcattctttgctcaagaa

SEQ ID NO: 72000 - DNA, 110 bp, synthetic construct
  source 1..110: mol_type = other DNA
taaaacacccaagaccaacattacatcagcatgaaagtttaagctctatggtgctcactatcaattgtcagcatagcaccattactataccaccaggaacatactataaa

SEQ ID NO: 72001 - DNA, 110 bp, synthetic construct
  source 1..110: mol_type = other DNA
tatttttaaggacttttagaataggttgtgatccattttaaatgtagtatctcagtagtcaagagtgtgttctcagcttttctccaaggaatgtttctcttgtacactgt

SEQ ID NO: 72002 - DNA, 110 bp, synthetic construct
  source 1..110: mol_type = other DNA
tggaatgaaagcacaacaggccagtttgactcacagtgaacaggggttacctctgccagctctggattatttcacagactgagttctttcagactcagaaagctgcagga

SEQ ID NO: 72003 - DNA, 110 bp, synthetic construct
  source 1..110: mol_type = other DNA
ccagctctggattatttcacagactgagttctttcagactcagaaagctgcaggagcttattaggccttctaaagtacaatgttggtacatgttaggttagcagttttgt

SEQ ID NO: 72004 - DNA, 110 bp, synthetic construct; identical to SEQ ID NO: 72002
  source 1..110: mol_type = other DNA

SEQ ID NO: 72005 - DNA, 110 bp, synthetic construct; identical to SEQ ID NO: 72003
  source 1..110: mol_type = other DNA

SEQ ID NO: 72006 - DNA, 110 bp, synthetic construct
  source 1..110: mol_type = other DNA
gtctggttcagaaaagatgcttgaaggctatctcctcaggacactcccttccctgcctcaatcctgtttccatttttttcccgctttagtctaggttggcatacttccag

SEQ ID NO: 72007 - DNA, 110 bp, synthetic construct
  source 1..110: mol_type = other DNA
cctcaatcctgtttccatttttttcccgctttagtctaggttggcatacttccagacaaaaggaggtgcatctttttctcaagaagaaaattataaacagacaggcccag

SEQ ID NO: 72008 - DNA, 110 bp, synthetic construct
  source 1..110: mol_type = other DNA
ttatatactagtgtgtatctaccaatctcaaattccccaattcatctcacccggcttttcccctttggtaaccgtaagtttgttttctctgtctgtgagtctatttctgt

SEQ ID NO: 72009 - DNA, 110 bp, synthetic construct; identical to SEQ ID NO: 72008
  source 1..110: mol_type = other DNA

SEQ ID NO: 72010 - DNA, 110 bp, synthetic construct
  source 1..110: mol_type = other DNA
taagcaaaggatgaattgtcctacccacaaatgacctcccgtgctctcaatttcttctttatttcaggccatttggattattagcatcttcttttttctcaaaattgtca

SEQ ID NO: 72011 - DNA, 110 bp, synthetic construct
  source 1..110: mol_type = other DNA
tctttatttcaggccatttggattattagcatcttcttttttctcaaaattgtcaccccccccccatttcactaagtctggctgaggaaaaggccatgatctccacactt

SEQ ID NO: 72012 - DNA, 110 bp, synthetic construct
  source 1..110: mol_type = other DNA
atcaggacgtatcatcttgcccttgccaaagcgtgaacacaacctcagggcgggccactctcttgcaaccctcgcaccctgggcaactcctgaacctttctggacggttt

SEQ ID NO: 72013 - DNA, 110 bp, synthetic construct
  source 1..110: mol_type = other DNA
cactctcttgcaaccctcgcaccctgggcaactcctgaacctttctggacggtttgagcactcaaagatcttgctgatttctctgagccgcgctacccataaaatcataa

SEQ ID NO: 72014 - DNA, 110 bp, synthetic construct
  source 1..110: mol_type = other DNA
caactttacactgcatttaattttgttcatgattggggcagtgggaaagggttctttttcagctgcacccggcataaggaagttccaacgttggatccttaacctgctta

SEQ ID NO: 72015 - DNA, 110 bp, synthetic construct
  source 1..110: mol_type = other DNA
cacatgggtcaagacctgataagtctgggaatgtccacctccatcgtcttggctcctctaaatctttgtctgcttgtgggagcctgaaagccttgtctcagcttgataac

SEQ ID NO: 72016 - DNA, 110 bp, synthetic construct
  source 1..110: mol_type = other DNA
ctctaaatctttgtctgcttgtgggagcctgaaagccttgtctcagcttgataactaaccctgcagggccccctgcagggctcacccaaaatcacaccccggcatgtctt

SEQ ID NO: 72017 - DNA, 110 bp, synthetic construct; identical to SEQ ID NO: 72015
  source 1..110: mol_type = other DNA

SEQ ID NO: 72018 - DNA, 110 bp, synthetic construct; identical to SEQ ID NO: 72016
  source 1..110: mol_type = other DNA

SEQ ID NO: 72019 - DNA, 110 bp, synthetic construct
  source 1..110: mol_type = other DNA
acacacgcaacccaggggttcagcttgctttggatccttctgcattcagaaaatgtggggggtgtctcaaaaaaaggagttcccattgtggctcagtagattaagaaccc

SEQ ID NO: 72020 - DNA, 110 bp, synthetic construct
  source 1..110: mol_type = other DNA
acagaaattcacacagggaccagcagctcctttcaagagtgactagaaagagcccacaacaattttaaaacatccaaactctggagttcccattgtggctcaggggttaa

SEQ ID NO: 72021 - DNA, 110 bp, synthetic construct
  source 1..110: mol_type = other DNA
gccccaggagtctctctctcacggtccacaccctgtctccagaagctagctggcatttcccattgaaatgttcctaccagttcatggctccctcggctcctgtgccgcta

SEQ ID NO: 72022 - DNA, 110 bp, synthetic construct
  source 1..110: mol_type = other DNA
tttcccattgaaatgttcctaccagttcatggctccctcggctcctgtgccgctaagccaaccttgctgcgtctgtccacacacctgtctttccttcttgcgggtggtgg

SEQ ID NO: 72023 - DNA, 110 bp, synthetic construct
  source 1..110: mol_type = other DNA
gctacagggagctgacagctgtgctcactgctcagggcttcacgcaaaggtgaggctggaatcgggaaagttccttcacactcggcctcatttgtcactgtcacaggccc

SEQ ID NO: 72024 - DNA, 110 bp, synthetic construct
  source 1..110: mol_type = other DNA
agataatgtcaactttccggcagcttttgtttttgcatgtttttaaaggccccagcttcttaagtttgggttaacatcttgattaataaaatgtaggagcaaaggggttg

SEQ ID NO: 72025 - DNA, 110 bp, synthetic construct
  source 1..110: mol_type = other DNA
cttcttaagtttgggttaacatcttgattaataaaatgtaggagcaaaggggttgcttttgactttattttattttttgtctttttagtgctacacctatggcatatgga

SEQ ID NO: 72026 - DNA, 110 bp, synthetic construct
  source 1..110: mol_type = other DNA
atggggactggagggaaattagaggtgaaggcactcttctccatcttgatcgtggtggttacatcatcacatgtgtctaccaaaactcaaaaatggtacattctactgca

SEQ ID NO: 72027 - DNA, 110 bp, synthetic construct
  source 1..110: mol_type = other DNA
ggttatttacatggaaatactcatcttgtgtggcttctgtcacctcttcccaatgccttattcagcaacatcacgttggtatcttgacataattcgtggtgggaatattt

SEQ ID NO: 72028 - DNA, 110 bp, synthetic construct
  source 1..110: mol_type = other DNA
ttctcgtccttgatgtccccctcagccacacactgttgctgaagccagaaaccaggatgtcctactggaccggcctcttcctcacacccgaggccagctcgctaacagca

SEQ ID NO: 72029 - DNA, 110 bp, synthetic construct
  source 1..110: mol_type = other DNA
actctggatgagaggagcgtcaaagatgtttgaaaagtactcataccctagaaggagtgaatcagctggccctttcccatctccatcaactgacttgtgtctttgccaag

SEQ ID NO: 72030 - DNA, 110 bp, synthetic construct
  source 1..110: mol_type = other DNA
tttggggtttgttgtttgtctgtttctcataaagtaccttttcccttttgtgacatggaacaggtaatgtctagggacacaccaattgaagtaaagaggcacccctgttt

SEQ ID NO: 72031 - DNA, 110 bp, synthetic construct
  source 1..110: mol_type = other DNA
ttttgtgacatggaacaggtaatgtctagggacacaccaattgaagtaaagaggcacccctgtttcttttttctttttcgtctttctagggctgcacctgtggcatatgg

SEQ ID NO: 72032 - DNA, 110 bp, synthetic construct
  source 1..110: mol_type = other DNA
attcgtggttccctatgagctcatcctgtctgcagaatgaatcaatagttttaatactttgtcatttaaatatggacagtcaaaaagtctttttccttctgaacctcagt

SEQ ID NO: 72033 - DNA, 110 bp, synthetic construct
  source 1..110: mol_type = other DNA
actttgtcatttaaatatggacagtcaaaaagtctttttccttctgaacctcagtgctgaccaacccgcaaggctcttgtgcctcctgtctgtctgctgggatctgagga

SEQ ID NO: 72034 - DNA, 110 bp, synthetic construct
  source 1..110: mol_type = other DNA
aagagctgtttatctgtaacctgggggtacagagggatgaggaaaaccatggtattgaagactgcctgggaccggtttccaagagtgtccttaaaaactctgagcttcgg

SEQ ID NO: 72035 - DNA, 110 bp, synthetic construct
  source 1..110: mol_type = other DNA
cagcagtgggttgtgtcatctgggctctacttccttgccagaaggttggggcattgcggggtccaatgaacatggaaagactaagggaaagctcagttttaagcttcagt

SEQ ID NO: 72036 - DNA, 110 bp, synthetic construct
  source 1..110: mol_type = other DNA
gcggggtccaatgaacatggaaagactaagggaaagctcagttttaagcttcagtgtaattccttcaatctagggtttttgttttaattgtaatttctttagctttccta

SEQ ID NO: 72037 - DNA, 110 bp, synthetic construct
  source 1..110: mol_type = other DNA
gaaagagaagagacccccgtcccccatccgtggctctgtcagtagagtatttccctccttttctagacatgctggtttggggaaggccgcttttgaggacactgattttt

SEQ ID NO: 72038 - DNA, 110 bp, synthetic construct
  source 1..110: mol_type = other DNA
cagagtcttctttttattctgtttaacagggtctaaatgattttctgcttggggtacatggcccttcctaaatctaaaatttgatgtcttacatcacttttggaaagttc

SEQ ID NO: 72039 - DNA, 110 bp, synthetic construct
  source 1..110: mol_type = other DNA
ctcaaaggaaaactcaggctcttggtaaaaatcctgtctcttagctcccactcaggctctggtccaggctccatcagatcggctttgctgctggaccagcttacagggga

SEQ ID NO: 72040 - DNA, 110 bp, synthetic construct
  source 1..110: mol_type = other DNA
gcccaacagagcacttagctctgcagggaattcaaagggaatcagtgtggttctactgccgagaagcagctcagaccaaaagtcacgcagcacaaatctgtccggctccg

SEQ ID NO: 72041 - DNA, 110 bp, synthetic construct
  source 1..110: mol_type = other DNA
gtgggtaaccctgaaacccgcccatcgtccatcctttttggctgcagagaatccgggctctctgggctcagccttagccttgtagaatctcggccgtgtttacagggctg

SEQ ID NO: 72042 - DNA, 110 bp, synthetic construct
  source 1..110: mol_type = other DNA
ggaagggacagttgtccaggttggcctgggacttggtgcacgtggttcggccaatctccacttccaagaagtagttcatccccgccacgacctgtacacatggagcgcag

SEQ ID NO: 72043 - DNA, 110 bp, synthetic construct
  source 1..110: mol_type = other DNA
ctccacttccaagaagtagttcatccccgccacgacctgtacacatggagcgcagatgaacctacaacacctgcccgctgcaaacacacggtcaccttcccacgggctgc

SEQ ID NO: 72044 - DNA, 110 bp, synthetic construct; identical to SEQ ID NO: 72042
  source 1..110: mol_type = other DNA

SEQ ID NO: 72045 - DNA, 110 bp, synthetic construct; identical to SEQ ID NO: 72043
  source 1..110: mol_type = other DNA

SEQ ID NO: 72046 - DNA, 110 bp, synthetic construct
  source 1..110: mol_type = other DNA
catggctcccaggcagattcgttaaccactgtgccacaacgggaactcctggattccttttatttctttttcttctgattgtcatagctaggactttcaaagttatgttg

SEQ ID NO: 72047 - DNA, 110 bp, synthetic construct
  source 1..110: mol_type = other DNA
gattcgttaaccactgtgccacaacgggaactcctggattccttttatttctttttcttctgattgtcatagctaggactttcaaagttatgttgagtagcagtggcaag

SEQ ID NO: 72048 - DNA, 110 bp, synthetic construct; identical to SEQ ID NO: 72046
  source 1..110: mol_type = other DNA

SEQ ID NO: 72049 - DNA, 110 bp, synthetic construct; identical to SEQ ID NO: 72047
  source 1..110: mol_type = other DNA

SEQ ID NO: 72050 - DNA, 110 bp, synthetic construct
  source 1..110: mol_type = other DNA
cggagagcttcagatagcctcaggaattccgaaagaccactcaaagcatcatagggcgttggcccagactctcagcttatgtgggttttagttgttctttggttttttgt

SEQ ID NO: 72051 - DNA, 110 bp, synthetic construct
  source 1..110: mol_type = other DNA
tttgtctgattttgtgccagttctatactttttttacacaccccagcatgtggaattttccagctgctacagtaacaatgccagatccttaagctgctgtgccacaagag

SEQ ID NO: 72052 - DNA, 110 bp, synthetic construct
  source 1..110: mol_type = other DNA
gctgaactacacacagcccgctctccaccctccacctacgtgaaaccttttgttccaccaaggccctagcactggcattctggtttgcaggttgtgtttttgctgtggtg

SEQ ID NO: 72053 - DNA, 110 bp, synthetic construct
  source 1..110: mol_type = other DNA
gcagttctgtatttggtgactgactcaaagaccatccttccaagcactgcaagggtagcaatgcaaggcccagtgaatctccttggagtgttgggagctcgggggacacc

SEQ ID NO: 72054 - DNA, 110 bp, synthetic construct
  source 1..110: mol_type = other DNA
tagcaatgcaaggcccagtgaatctccttggagtgttgggagctcgggggacaccacttacgtcaatgaaggatgcgttcacgtagtctgtattctcctcacccctctta

SEQ ID NO: 72055 - DNA, 110 bp, synthetic construct
  source 1..110: mol_type = other DNA
caactagtatccatgaggatgtgggttttttcccttgaccttgctcagtgggttaaccatctggccttgccactagctagagtgaaggtggcagacacggcttggatctg

SEQ ID NO: 72056 - DNA, 110 bp, synthetic construct
  source 1..110: mol_type = other DNA
cagtgggttaaccatctggccttgccactagctagagtgaaggtggcagacacggcttggatctgacattgctgtggttgtgatgcaggctggcagctgcagctccgatt

SEQ ID NO: 72057 - DNA, 110 bp, synthetic construct
  source 1..110: mol_type = other DNA
aggatgtgggttttttcccttgaccttgctcagtgggttaaccatctggccttgccactagctagagtgaaggtggcagacacggcttggatctgacattgctgtggttg

SEQ ID NO: 72058 - DNA, 110 bp, synthetic construct; identical to SEQ ID NO: 72057
  source 1..110: mol_type = other DNA

SEQ ID NO: 72059 - DNA, 110 bp, synthetic construct
  source 1..110: mol_type = other DNA
catgggagtgggagaatcctgcagcaacagcatctcagagaccagcgcccactcccaggagtgctgtgaagatgtagaggtgactccttggtgccagcttccagacccct

SEQ ID NO: 72060 - DNA, 110 bp, synthetic construct
  source 1..110: mol_type = other DNA
caggagtgctgtgaagatgtagaggtgactccttggtgccagcttccagacccctggatcatgaggtggtggtaagttcttgaacttactatgtgcaggtatggcatcct

SEQ ID NO: 72061 - DNA, 110 bp, synthetic construct
  source 1..110: mol_type = other DNA
tacccctccaccagcctggcataaaggcacagctggtaggaaaccgaggaaacctcccataactgctcctcccttggaaaccaagtggaccatgcatcccacattctggc

SEQ ID NO: 72062 - DNA, 110 bp, synthetic construct
  source 1..110: mol_type = other DNA
gattcgttaaccactgcgccacgacgggaactccgcattctgtcttaattactgtagctttgtaataagttttgaaattgggaaatctgaatcctccaactttgtttaag

SEQ ID NO: 72063 - DNA, 110 bp, synthetic construct
  source 1..110: mol_type = other DNA
aacaagtgagaaaggtgtggccaaggttttagtaggaagaccctgagctcaccatctccaacagtgcaccaatattacaactatttacagggcaactgagcaactaccaa

SEQ ID NO: 72064 - DNA, 110 bp, synthetic construct
  source 1..110: mol_type = other DNA
aggcaggacagtcacagcgtgtgctataggtgaggtgacacacacacaaaatactgtgttagaaagaggagttgagcagctgcaggaggctagtgggcacagataagtga

SEQ ID NO: 72065 - DNA, 110 bp, synthetic construct
  source 1..110: mol_type = other DNA
gctgtctgtgcagagccagggttggcagagcctgtgggactgaggtgagcaggcaagtctgccacctgagccagcagccctttggccttaagtctgagaagtaacagcca

SEQ ID NO: 72066 - DNA, 110 bp, synthetic construct
  source 1..110: mol_type = other DNA
agtctgccacctgagccagcagccctttggccttaagtctgagaagtaacagccaaatgccagccaccgtactcaggattttccaggcacggaaggcatctccactctat

SEQ ID NO: 72067 - DNA, 110 bp, synthetic construct
  source 1..110: mol_type = other DNA
accttgtttatctaattcttgaccttgttatgtctgccccctcacctggctaacgcttgtcttccccagcagaccaatcacaggggctgcttctgccccacctctgcgcc

SEQ ID NO: 72068 - DNA, 110 bp, synthetic construct
  source 1..110: mol_type = other DNA
ggcagggagggcgtgaagaccagcagacactctgagttaaggaaatgcagctgggagtccagggagaccaaggagagcagggtttgcaagaaggagtatcagagaggaga

SEQ ID NO: 72069 - DNA, 110 bp, synthetic construct
  source 1..110: mol_type = other DNA
gaggagatgagatttgagggaagatgggaaggaaagaagggaatgagctgtggaaattctggggacagtgggtaccaggcagaagtgggctccaggaagaggcccgcgtg

SEQ ID NO: 72070 - DNA, 110 bp, synthetic construct
  source 1..110: mol_type = other DNA
agtggtgcccaagcaaggtcctcgccagcagccctgtccatctagagagtcaatccagtgtctccatctggccaggaagctcagttcacagttctacctgatttggattc

SEQ ID NO: 72071 - DNA, 110 bp, synthetic construct
  source 1..110: mol_type = other DNA
gtgagcacatgcgtcctacctccagctgtttgggcttgtgtgttctgctgaaatgcagtgtgtgcctctcttcaccggtctggcttgatggatgggcttgtgtgtctggg

SEQ ID NO: 72072 - DNA, 110 bp, synthetic construct
  source 1..110: mol_type = other DNA
agcaggaatcactttctaccccactggctccccctcctctccccttctgttataagaaataataaattgggagctcccactgtggcacaacaggatcgacagtgatctgt

SEQ ID NO: 72073 - DNA, 110 bp, synthetic construct
  source 1..110: mol_type = other DNA
gaggtacgatggccgtctctgctccctgcccttccacagaacggtcagttggtcaatcaacaaacctcaattagcagcccatcgtgggctcagcctgacatggggtgtga

SEQ ID NO: 72074 - DNA, 110 bp, synthetic construct
  source 1..110: mol_type = other DNA
atcaacaaacctcaattagcagcccatcgtgggctcagcctgacatggggtgtgaaggggtgaaaagatggtggcgctccatcctgcatgcccacaccttctagccattg

SEQ ID NO: 72075 - DNA, 110 bp, synthetic construct; identical to SEQ ID NO: 72073
  source 1..110: mol_type = other DNA

SEQ ID NO: 72076 - DNA, 110 bp, synthetic construct; identical to SEQ ID NO: 72074
  source 1..110: mol_type = other DNA

SEQ ID NO: 72077 - DNA, 110 bp, synthetic construct
  source 1..110: mol_type = other DNA
ttgctagggcacctaccacattggcttgaaatccatctagataatgcaggaactgtgtcttattgggctgttagtctccagggttcagcggaaagctggtatcaggataa

SEQ ID NO: 72078 - DNA, 110 bp, synthetic construct
  source 1..110: mol_type = other DNA
tgtcttattgggctgttagtctccagggttcagcggaaagctggtatcaggataaacttatcaatgccaaccaaagaaggtgcccaatgctgcatttactgttttctggg

SEQ ID NO: 72079 - DNA, 110 bp, synthetic construct
  source 1..110: mol_type = other DNA
tcaaattgtattacccttttcatagtgcaaggcacatagcaggtgctcaataaaatactagacttgtttctgtacatcagtcactttctatacatttaattttcaaacta

SEQ ID NO: 72080 - DNA, 110 bp, synthetic construct
  source 1..110: mol_type = other DNA
tactagacttgtttctgtacatcagtcactttctatacatttaattttcaaactaggagctgagtattcatgttttaatccctctgtcctgacactaccattttatggct

SEQ ID NO: 72081 - DNA, 110 bp, synthetic construct
  source 1..110: mol_type = other DNA
tctggagattcccatcctggcgtggcctcaaagaggtgctttgaacttggcagcaagtcccttagtctcgctatagtgcagtttactattctcagaagtgagagactggg

SEQ ID NO: 72082 - DNA, 110 bp, synthetic construct
  source 1..110: mol_type = other DNA
aatattcttccctgatcacccacttttgaggtactgctaagactcctgttccccttttgctgtagcagatttcgtaaattcatctttgcttaatccacagctttttctga

SEQ ID NO: 72083 - DNA, 110 bp, synthetic construct
  source 1..110: mol_type = other DNA
tttgctgtagcagatttcgtaaattcatctttgcttaatccacagctttttctgatagtctttctggaggagttgacaatagacaaaatgtcaaaatgtggttgatttat

SEQ ID NO: 72084 - DNA, 110 bp, synthetic construct
  source 1..110: mol_type = other DNA
aaatgagacaaggagagtttgcagactggcccagagatgcaatgtaatttgcccggggtattttttttcctgggaattatgaattagttttaaaatactttaagttggga

SEQ ID NO: 72085 - DNA, 110 bp, synthetic construct
  source 1..110: mol_type = other DNA
gcctggactctccagctgtgtggggctatacacggctgtgtcaggaacagcatgccagggctttggcaggatgaggcccttgtttctgcaggtgagcctgggacactgtc

SEQ ID NO: 72086 - DNA, 110 bp, synthetic construct
  source 1..110: mol_type = other DNA
gcaaacacatcactctccctttagctgacatatttttaatcaatctgacagttaactctcactattatgattcatgtctctgccttgtcactaattatcagtttgagttg

SEQ ID NO: 72087 - DNA, 110 bp, synthetic construct
  source 1..110: mol_type = other DNA
ctctcactattatgattcatgtctctgccttgtcactaattatcagtttgagttgtcttacaatgaaaacggtagcacagtggactcttactaattcaagtgactgcttg

SEQ ID NO: 72088 - DNA, 110 bp, synthetic construct; identical to SEQ ID NO: 72086
  source 1..110: mol_type = other DNA

SEQ ID NO: 72089 - DNA, 110 bp, synthetic construct; identical to SEQ ID NO: 72087
  source 1..110: mol_type = other DNA

SEQ ID NO: 72090 - DNA, 110 bp, synthetic construct
  source 1..110: mol_type = other DNA
agaagtcagatctaaaggcttaatgaaggttaacattttgggtaaaaatactttggagctgatgttatgtactttgtactgcattatatcatgaagcacatcgtgtcagg

SEQ ID NO: 72091 - DNA, 110 bp, synthetic construct
  source 1..110: mol_type = other DNA
ctgtgctgtataatataaccttgtagcttatttaatttatacatggtagtttgttcctctttatcctctacccctatcttgttctctctcttccctctttccactggtaa

SEQ ID NO: 72092 - DNA, 110 bp, synthetic construct
  source 1..110: mol_type = other DNA
taaccttgtagcttatttaatttatacatggtagtttgttcctctttatcctctacccctatcttgttctctctcttccctctttccactggtaaccactagtttgttct

SEQ ID NO: 72093 - DNA, 110 bp, synthetic construct
  source 1..110: mol_type = other DNA
ccggtcctacccgccgccccactctggaactctcattcttcgggacccaacttaagtatcactttttcagaaaccttacctcgtcgctttctgaaggcgccgtaagctca

SEQ ID NO: 72094 - DNA, 110 bp, synthetic construct
  source 1..110: mol_type = other DNA
gtatcactttttcagaaaccttacctcgtcgctttctgaaggcgccgtaagctcactgctgggtttttgcactctgcgcatagttacttttcctgctcctctttggcagc

SEQ ID NO: 72095 - DNA, 110 bp, synthetic construct
  source 1..110: mol_type = other DNA
gttattccattgctctctcatctcttccggccccagccaccttccaccacactcccctttcccccacataccaggcattgagctacgagcttaaccactctgggctttca

SEQ ID NO: 72096 - DNA, 110 bp, synthetic construct
  source 1..110: mol_type = other DNA
cctttcccccacataccaggcattgagctacgagcttaaccactctgggctttcactccctctggagaagatttttcctccctttctgtgccttgcagacttgtcatgtt

SEQ ID NO: 72097 - DNA, 110 bp, synthetic construct
  source 1..110: mol_type = other DNA
gcccgcagcaagtgcagcatagagcccgggaggccgcccctttaagtgcaacaccaggaaacggcctcacattcagatgcccacagggctccctggtccattgccctcca

SEQ ID NO: 72098 - DNA, 110 bp, synthetic construct
  source 1..110: mol_type = other DNA
atcaaggctacacttatttgtatcatattgtgttaatgtcttcctcactctcccgtcattttcttatcatacataatttccaggccatacctctccctttttgggtgatt

SEQ ID NO: 72099 - DNA, 110 bp, synthetic construct
  source 1..110: mol_type = other DNA
gagggtgcacacgccacttcagctgccagattaaggaagcacagaggaaagagcactcgggaagtgcaggccagttggctaagtccgagctaatccagtctccagatggg

SEQ ID NO: 72100 - DNA, 110 bp, synthetic construct
  source 1..110: mol_type = other DNA
ctcgggaagtgcaggccagttggctaagtccgagctaatccagtctccagatgggcctgtgttcaaatccccaccgtgctatttacagaatgcattgatagggaggatgt

SEQ ID NO: 72101 - DNA, 110 bp, synthetic construct
  source 1..110: mol_type = other DNA
tgccccaagaaccccctgctctgaacaaggtcctggacttggaactcatcacggtctctagctgacccttgccactggcacggctgcctccaggttcagagtctgggctg

SEQ ID NO: 72102 - DNA, 110 bp, synthetic construct
  source 1..110: mol_type = other DNA
ctctagctgacccttgccactggcacggctgcctccaggttcagagtctgggctgtgggcttctgatggtcatggttaggtacagcatctttgttccatcagggactgag

SEQ ID NO: 72103 - DNA, 110 bp, synthetic construct
  source 1..110: mol_type = other DNA
gtccctagatttgacagtttctggcacatgaatttgttgagtgaacaaacgaacggatgaatgagtgaatacctatgggctagaaaaccgggaagccctttttggaggaa

SEQ ID NO: 72104 - DNA, 110 bp, synthetic construct
  source 1..110: mol_type = other DNA
ttgggttggatgaataatcagtttaatacctaggtttccctcccttttttgataaaaaagaagaagaggaagaagagcttaaagcagttcgcatagatcatctcttgaat

SEQ ID NO: 72105 - DNA, 110 bp, synthetic construct
  source 1..110: mol_type = other DNA
aaaagaagaagaggaagaagagcttaaagcagttcgcatagatcatctcttgaatcttcccaacatcccgggaggaaagactggcgcttttagctagctgaacacacata

SEQ ID NO: 72106 - DNA, 110 bp, synthetic construct
  source 1..110: mol_type = other DNA
acctctgacactcttgtgagctgttcatcagccataatgaagctcacggtctcgtagaagatctttagggaagacatgacaatgctgtgcccttgtttaaagtctcctgt

SEQ ID NO: 72107 - DNA, 110 bp, synthetic construct
  source 1..110: mol_type = other DNA
agattggtagttagttttgaaactgggaagtgtgaatccttcaacttagttcttctttctcaagatcgttttcactatttggggtcccttggaattccatatgaatttta

SEQ ID NO: 72108 - DNA, 110 bp, synthetic construct
  source 1..110: mol_type = other DNA
tttctcaagatcgttttcactatttggggtcccttggaattccatatgaattttaggatcatcttgtcgatttctgcccaaaaaaaaaaaaaataaaaaataagccagct

SEQ ID NO: 72109 - DNA, 110 bp, synthetic construct
  source 1..110: mol_type = other DNA
gggcatgccctatgtgtcccctcagagagtggcctcagctccgaccccctgccggggaaacaggacagggtggaggaggaaaagcctggtgtccatacctgacgtctggg

SEQ ID NO: 72110 - DNA, 110 bp, synthetic construct
  source 1..110: mol_type = other DNA
ttatctttgctggtatgtttcttttttccttttttctttagagcacacatctccttagtaaacaatgtacactttcccaccaactgccttctttaagcatcgcacataat

SEQ ID NO: 72111 - DNA, 110 bp, synthetic construct
  source 1..110: mol_type = other DNA
tagtaaacaatgtacactttcccaccaactgccttctttaagcatcgcacataatggcccaatacaatgcatgtacacaaacacaagaaccctcacatacctatgtattt

SEQ ID NO: 72112 - DNA, 110 bp, synthetic construct; identical to SEQ ID NO: 72110
  source 1..110: mol_type = other DNA

SEQ ID NO: 72113 - DNA, 110 bp, synthetic construct; identical to SEQ ID NO: 72111
  source 1..110: mol_type = other DNA

SEQ ID NO: 72114 - DNA, 110 bp, synthetic construct
  source 1..110: mol_type = other DNA
gagacatatgtagtcctcgttgtccacagcatggggctttccccatgtttcccacttcaaagttcccttctcagagtctgccttcagcccacaaatacatcaattctcct

SEQ ID NO: 72115 - DNA, 110 bp, synthetic construct
  source 1..110: mol_type = other DNA
agagcccaactcagccgctcagactccgctcccgggagttgccaacacatctttgtgtttcctcagcggtaccagtcagccctgtttgctgtttaattccaggtgatgag

SEQ ID NO: 72116 - DNA, 110 bp, synthetic construct
  source 1..110: mol_type = other DNA
tgtttcctcagcggtaccagtcagccctgtttgctgtttaattccaggtgatgagacgtggcaattgtggctttggctgaaatctgtacatggcatcctaatcaccaaat

SEQ ID NO: 72117 - DNA, 110 bp, synthetic construct
  source 1..110: mol_type = other DNA
cagggatgttgtcatccttttaaatgtgtttatgttcctggcatgagcacccttcctctgttcagagtttgaccacagggcacggctgagtttttgttgtggtcgttggg

SEQ ID NO: 72118 - DNA, 110 bp, synthetic construct
  source 1..110: mol_type = other DNA
ctctgttcagagtttgaccacagggcacggctgagtttttgttgtggtcgttggggtttgtgtgtcagttgcttttgtttggtaaaaagacttgaagagcctttgcctgc

SEQ ID NO: 72119 - DNA, 110 bp, synthetic construct
  source 1..110: mol_type = other DNA
tcatatggtagttctatatttcattttctgaagtacttccatactgtttcccatagtggttgtaccagtttattcttctccacaccctctccagcatttgctatttgttg

SEQ ID NO: 72120 - DNA, 110 bp, synthetic construct; identical to SEQ ID NO: 72119
  source 1..110: mol_type = other DNA

SEQ ID NO: 72121 - DNA, 110 bp, synthetic construct
  source 1..110: mol_type = other DNA
gggggccggcttgagccttcctctcgcatcccccagccgcgcgtctgggtcctggctaaattgctctcgcttgcagtaaatgactccataagcaccgtatcagaccattg

SEQ ID NO: 72122 - DNA, 110 bp, synthetic construct
  source 1..110: mol_type = other DNA
acacctgccttttttgatgcctccaggcctgtcccaattcaggccatgtttgcctctctcctggacagcggggaaagcctcccagggaggtgcccagcctgctgtctcaa

SEQ ID NO: 72123 - DNA, 110 bp, synthetic construct
  source 1..110: mol_type = other DNA
tggctccaggccaatagctgaagtaggaaatctaaaatagaggccatcagcatggaagaattagtgttttgccagccttttcccttcccccacaacctgcctatctaggt

SEQ ID NO: 72124 - DNA, 110 bp, synthetic construct
  source 1..110: mol_type = other DNA
aagaattagtgttttgccagccttttcccttcccccacaacctgcctatctaggtgttggcaatatgtagtgtgctctgtgttgatagcatagggcctgggtaccgtgga

SEQ ID NO: 72125 - DNA, 110 bp, synthetic construct
  source 1..110: mol_type = other DNA
gatggctttcttgagttgatcattgacttagagaactctcccaactttccctctccatctatggttccctacttggacttctacgactacctgtgtaattctcctaccct

SEQ ID NO: 72126 - DNA, 110 bp, synthetic construct
  source 1..110: mol_type = other DNA
catctatggttccctacttggacttctacgactacctgtgtaattctcctaccctatccctatcagttggagacatctgtagccaggatgacttcgctgagctgagactt

SEQ ID NO: 72127 - DNA, 110 bp, synthetic construct
  source 1..110: mol_type = other DNA
tgccatcccagcttcttgcacctgcagctcttctcctggacaccatcgccccccttatctatgccttcaacatctccttccctctggagagtctttttccagatccactg

SEQ ID NO: 72128 - DNA, 110 bp, synthetic construct
  source 1..110: mol_type = other DNA
tatctatgccttcaacatctccttccctctggagagtctttttccagatccactgggcggaagttgttgctgctccttccaggccctcaacaaatgttcttctgtggaac

SEQ ID NO: 72129 - DNA, 110 bp, synthetic construct
  source 1..110: mol_type = other DNA
tgtctgctctgaccctccccccccaaaggtactatttctgtctactgcttcaagctctttgtgtctgtgggtcaagcgtcttggtgacctggggagacccagaatggcta

SEQ ID NO: 72130 - DNA, 110 bp, synthetic construct
  source 1..110: mol_type = other DNA
tctttgtgtctgtgggtcaagcgtcttggtgacctggggagacccagaatggctaccccttgcttctaatgccacagcgggtgagggtggaagtgatgatggtattgcag

SEQ ID NO: 72131 - DNA, 110 bp, synthetic construct
  source 1..110: mol_type = other DNA
gatggccaatgcaaagggaacactgtgaccctctctctctgtctccctggaagctcacctctcatgtgaaaggtgtgctcccggcatctggaggtggacagacctcctat

SEQ ID NO: 72132 - DNA, 110 bp, synthetic construct
  source 1..110: mol_type = other DNA
cacctctcatgtgaaaggtgtgctcccggcatctggaggtggacagacctcctatcaccagcgatgggaattcctgtataaacacaccttgttacttctctgcctcacta

SEQ ID NO: 72133 - DNA, 110 bp, synthetic construct
  source 1..110: mol_type = other DNA
ccaacatgcggcagcaaaataaatgactgtgatggttttgagctactaagtttagaggtgctctgctgtgcagcgatactaaccaaaacaagaacactagggagactcca

SEQ ID NO: 72134 - DNA, 110 bp, synthetic construct
  source 1..110: mol_type = other DNA
cagttctgtagcaccaccagcaaccgggggtataagtccttcagacccacatgaaaatctgggcagcatagcagagcacccccaaccatccacgtggctttcttcatgct

SEQ ID NO: 72135 - DNA, 110 bp, synthetic construct
  source 1..110: mol_type = other DNA
ccaagttacctctttttactaccaggtgggtggggcccaaaggcagttccttcgccccaagcccactaggcaaggtaaaggctggagtcgaagctgagtcctctcccatc

SEQ ID NO: 72136 - DNA, 110 bp, synthetic construct
  source 1..110: mol_type = other DNA
agcagcgcctctcccactcgtgtgtgtgctgacccctgggagttgaagttgtggattttgactcagtaggtctaagggagggtctgagattctgtacttcttacaagctc

SEQ ID NO: 72137 - DNA, 110 bp, synthetic construct
  source 1..110: mol_type = other DNA
ttttgactcagtaggtctaagggagggtctgagattctgtacttcttacaagctcctggtgattatgctgacacttcagaccacactctgagtagcaaagccctagggca

SEQ ID NO: 72138 - DNA, 110 bp, synthetic construct; identical to SEQ ID NO: 72136
  source 1..110: mol_type = other DNA

SEQ ID NO: 72139 - DNA, 110 bp, synthetic construct; identical to SEQ ID NO: 72137
  source 1..110: mol_type = other DNA

SEQ ID NO: 72140 - DNA, 110 bp, synthetic construct
  source 1..110: mol_type = other DNA
aagaacaggaccttccctgttctctccccaggacatttagccaacgccaccacagacctcatgaaactggaccatgaagaggagccccagctctctgagccctacctttc

SEQ ID NO: 72141 - DNA, 110 bp, synthetic construct
  source 1..110: mol_type = other DNA
ctcatgcccttcattggtctgtagcagcgatgactgagtttgaaatagctttgccttcagtgtggacttcgcttgagatgactgcaggtgattatctttgagcctctctt

SEQ ID NO: 72142 - DNA, 110 bp, synthetic construct
  source 1..110: mol_type = other DNA
ttcagtgtggacttcgcttgagatgactgcaggtgattatctttgagcctctcttgacattgcatgccactgactacagcatcccatcctctaatgagaaattagccaac

SEQ ID NO: 72143 - DNA, 110 bp, synthetic construct
  source 1..110: mol_type = other DNA
tatgtttaaataattgagactcttttacatgtctgtgtcatttgaatttcttttgtggctgcttgatcgatcatgcttctttaatatggtttttgtgtgtatttcaagtc

SEQ ID NO: 72144 - DNA, 110 bp, synthetic construct
  source 1..110: mol_type = other DNA
ggctgttggctggaacctccagttccctgccacgtgggcctctctgcagggctgttgacagcatggcagcttgcttctcccgagtgaccgagccaagcaatagagagaac

SEQ ID NO: 72145 - DNA, 110 bp, synthetic construct
  source 1..110: mol_type = other DNA
tagtaataactctggaatcccagggtatggtttatgtcctctgctcctccacccactgtggaatgtgaaagatcggagcagcaggagcaggatggcctggagacagaaag

SEQ ID NO: 72146 - DNA, 110 bp, synthetic construct
  source 1..110: mol_type = other DNA
ctgtggaatgtgaaagatcggagcagcaggagcaggatggcctggagacagaaagcttggtggcttggagtttggccaccttatctttctcatcctcttttgggtccctg

SEQ ID NO: 72147 - DNA, 110 bp, synthetic construct
  source 1..110: mol_type = other DNA
tgtgataagtggaggaagcctcaggtctttcctgctctcatctctaaggtgggcgagctacctcactgtccttctctagctgggtgtctgagtcacagacccaggctatc

SEQ ID NO: 72148 - DNA, 110 bp, synthetic construct
  source 1..110: mol_type = other DNA
tcttaccaggggagctttgtgaaccatgaaggtctgtagtcgtgttggtgattcttatgcatcccagggcgcccgtccagagggagacgtgtatacaggtgtccaggaaa

SEQ ID NO: 72149 - DNA, 110 bp, synthetic construct
  source 1..110: mol_type = other DNA
agggagaaaagcttggatggctggctggctggctggctggctggctagatggctgctctggcaaggaaacattctgaaatctatccatgtcacttttattttccaggccg

SEQ ID NO: 72150 - DNA, 110 bp, synthetic construct
  source 1..110: mol_type = other DNA
ctctggcaaggaaacattctgaaatctatccatgtcacttttattttccaggccgaccctcactcctcctgcccctgtgtgcctctgtgtctttgctgggtggtctgacc

SEQ ID NO: 72151 - DNA, 110 bp, synthetic construct
  source 1..110: mol_type = other DNA
tcccccaggactccctccctcccctttttccagctttacttaaatgtcaccttctcagagtctctggctgtgatccccacagtcaccccccagcactcccaatcctccat

SEQ ID NO: 72152 - DNA, 110 bp, synthetic construct
  source 1..110: mol_type = other DNA
gtctttctggccaagggggctccttatctgggctctggggccagatgagcctgttggggaaaggggtccattctgagcttcctccattccttcctacagaattggagcgc

SEQ ID NO: 72153 - DNA, 110 bp, synthetic construct
  source 1..110: mol_type = other DNA
aaaaaaagacgacattctgtttcatcatggctatttgttgaaaagactctctcgtttgcactgcatagatttggtaatttaatcaaatgactatgtatattggaatctct

SEQ ID NO: 72154 - DNA, 110 bp, synthetic construct
  source 1..110: mol_type = other DNA
cgcagcagccacaccttgtccttctcctgcagacccttcctaggggcacacagggccgcacccctcacacctcccccggggccccactttgcttcctgcccagggagcca

SEQ ID NO: 72155 - DNA, 110 bp, synthetic construct
  source 1..110: mol_type = other DNA
ttcattttaagaagcacccaggacttgtcccttcaggggctctccaccttggccaggttctgaggggttagctggcccctccgagaagggaggtttggagaaaccacaag

SEQ ID NO: 72156 - DNA, 110 bp, synthetic construct
  source 1..110: mol_type = other DNA
ggttctgaggggttagctggcccctccgagaagggaggtttggagaaaccacaagcaagcaacccccaggtcaaaggcttgatcagtatcccaggtttcaaacccaagag

SEQ ID NO: 72157 - DNA, 110 bp, synthetic construct
  source 1..110: mol_type = other DNA
gagtacatcgtgacacattgattcattccgatgaggatgggcccgggtcattatgaccctggggctattcccggtgtggccagggtggacttcctgcaactcgcctccca

SEQ ID NO: 72158 - DNA, 110 bp, synthetic construct
  source 1..110: mol_type = other DNA
gaccacccagagctagctccctctgccctcccggtgtggtgagggcaggaggccaaggacgccagtctgaagctactctccacgctgggacccgcactccccaaagtcaa

SEQ ID NO: 72159 - DNA, 110 bp, synthetic construct
  source 1..110: mol_type = other DNA
aggacgccagtctgaagctactctccacgctgggacccgcactccccaaagtcaaggaaccaggagaatctatgccacagagtgcacccattcaatcccattcactccca

SEQ ID NO: 72160 - DNA, 110 bp, synthetic construct
  source 1..110: mol_type = other DNA
cacattcattcaaatctttgctggtctggcgggagaaagatactttcttaatagttagtaataaggttgtttaggtttacctgtcatttgcattttttgataaattgctc

SEQ ID NO: 72161 - DNA, 110 bp, synthetic construct
  source 1..110: mol_type = other DNA
taataatgatctatcagttgtgcccatcaaacgtactgagggtggggataggatgcctccccaccttccacctggaacttgtcggctctaccttcattttcatgctgtca

SEQ ID NO: 72162 - DNA, 110 bp, synthetic construct
  source 1..110: mol_type = other DNA
cctccccaccttccacctggaacttgtcggctctaccttcattttcatgctgtcacagccaatggtgtttcatcctgtgcagtagttgttttctgtgccttacgtggagg

SEQ ID NO: 72163 - DNA, 110 bp, synthetic construct
  source 1..110: mol_type = other DNA
ttggtgcttccccttggcccagcttcccggccagtgcctggatctggtctgcagcctccctgcctggttatccagccactctacgaacacttcctttgacacaaaactca

SEQ ID NO: 72164 - DNA, 110 bp, synthetic construct
  source 1..110: mol_type = other DNA
ctccctgcctggttatccagccactctacgaacacttcctttgacacaaaactcacttttcctaggtttttctattgcagattatactctttgcatggacagctgcagta

SEQ ID NO: 72165 - DNA, 110 bp, synthetic construct
  source 1..110: mol_type = other DNA
ctgaataaccgtctagtgtatggattaccacattttgtttattcatgcatcagctagtgcacatttgtgtccactttttgccttttgtgaagtcttactatgcgcatctg

SEQ ID NO: 72166 - DNA, 110 bp, synthetic construct
  source 1..110: mol_type = other DNA
agtgcacatttgtgtccactttttgccttttgtgaagtcttactatgcgcatctgtgtacaagtgtttgtttgaacatctgttttcaattctttggggtatttacctggg

SEQ ID NO: 72167 - DNA, 110 bp, synthetic construct
  source 1..110: mol_type = other DNA
caccacaagttcatcacccttgcaagcaggcgcctaagaatacctccattcaaccacagttcagagattcacacagattcctctctgtgttacctccagcagagttttgc

SEQ ID NO: 72168 - DNA, 110 bp, synthetic construct
  source 1..110: mol_type = other DNA
acagttcagagattcacacagattcctctctgtgttacctccagcagagttttgcatttagtattgaagggaaaccaaataccgcaattattggaggaggcaggaggagt

SEQ ID NO: 72169 - DNA, 110 bp, synthetic construct
  source 1..110: mol_type = other DNA
ccttcccttcctgcagctctttgcttccatgtcgctttctcagggtggccttttgtgacctgccctgtttaaaattttcccctcctttttgtctgacactctgagtcccc

SEQ ID NO: 72170 - DNA, 110 bp, synthetic construct
  source 1..110: mol_type = other DNA
tgctgtggagctgtcttctgccagattcagttcagtgccctaatgatagctacttttgccagcggatctcctgtgcgccaggcactttctggaagtctcacccgcaccgt

SEQ ID NO: 72171 - DNA, 110 bp, synthetic construct
  source 1..110: mol_type = other DNA
gtgacggcagcctctcaggagcaggacttggcaggatgaggctcggcctcagacctgctgacagtgggttaaagcttgtagaactttacaaacaggaggagatccttgag

SEQ ID NO: 72172 - DNA, 110 bp, synthetic construct
  source 1..110: mol_type = other DNA
aaaccaaattggctgggaattgaccacaattgaagctgaatggtggctaagggggtaccttgtgttaatttatgtatatttataacatttcatcaaaaaaaaagatgttt

SEQ ID NO: 72173 - DNA, 110 bp, synthetic construct
  source 1..110: mol_type = other DNA
taccttgtgttaatttatgtatatttataacatttcatcaaaaaaaaagatgtttttaaatcttgcccccagccacaaggagtggaagggagctaacaccttccaagtcc

SEQ ID NO: 72174 - DNA, 110 bp, synthetic construct
  source 1..110: mol_type = other DNA
cagtggcccccatcctttcaaggtggtcggttagagtgcatgtgtttcaccctcgactatcccctgcattgaagaaagtaacatattctcaagagaaagcaggttgcttt

SEQ ID NO: 72175 - DNA, 110 bp, synthetic construct
  source 1..110: mol_type = other DNA
actatcccctgcattgaagaaagtaacatattctcaagagaaagcaggttgctttcaataggttgtgtggtgagtaaaggaagagctggtggctggtggtgtttatttcc

SEQ ID NO: 72176 - DNA, 110 bp, synthetic construct
  source 1..110: mol_type = other DNA
gtcaccttggtcaagtatttaattcctttgtgctttagtacatcatgggtaaaatggagctaataattcttagcacctaacttacgctgtgaaaatttaatcttttaaat

SEQ ID NO: 72177 - DNA, 110 bp, synthetic construct
  source 1..110: mol_type = other DNA
acttgaactcccatcagtagcttgttagggcacctctttgctacatcctaacttacacattgttatcaagtttctgatcttcgtcaatctgatgggtataaaaatgctgt

SEQ ID NO: 72178 - DNA, 110 bp, synthetic construct
  source 1..110: mol_type = other DNA
ttatttctgggctctctattctattcctttcacctgtgtgtctgtttttgggccagtaccatactgttttgattactatagcattgtattatggtttgaagtcagggaat

SEQ ID NO: 72179 - DNA, 110 bp, synthetic construct; identical to SEQ ID NO: 72178
  source 1..110: mol_type = other DNA

SEQ ID NO: 72180 - DNA, 110 bp, synthetic construct
  source 1..110: mol_type = other DNA
actggggcgcttgcctggctggaaggttgtctctggttgtttgaggaaggccttggttcctcctcacctggacctctccaccagctccttgagtgtcctcacagtgtggt

SEQ ID NO: 72181 - DNA, 110 bp, synthetic construct
  source 1..110: mol_type = other DNA
actgcaaaagccacctggctctcggtcccatatcctctgctttcagactgccttctgactttgctgtcaaacttatggactaagtatatacaaacttcacaggcaaatac

SEQ ID NO: 72182 - DNA, 110 bp, synthetic construct
  source 1..110: mol_type = other DNA
cagtgaatcttaacctgaaactctataaaggaactatgatctcacccagcttagaggtgaagaaaccagcctcagagagggacgtgacaataaggtcacacagcttgtaa

SEQ ID NO: 72183 - DNA, 110 bp, synthetic construct
  source 1..110: mol_type = other DNA
ggtgaagaaaccagcctcagagagggacgtgacaataaggtcacacagcttgtaagacggcagagctggaaatctatggaaacttgaccatcatctcaagccggaatttt

SEQ ID NO: 72184 - DNA, 110 bp, synthetic construct
  source 1..110: mol_type = other DNA
ctcagccccgtgcctgcttcgctgcaagaaagctgcgagggcacctttctcatttctgctttgaggaatgcccttccttccaagcaagtgatggaggtgttgacactgtt

SEQ ID NO: 72185 - DNA, 110 bp, synthetic construct
  source 1..110: mol_type = other DNA
aaaacctgacatcatcctttggggctgaacaccctgaagcgttttcaaatctgtccttccttcgtacgtctccgaacataaccgggtcactgggatgactggtggtctga

SEQ ID NO: 72186 - DNA, 110 bp, synthetic construct
  source 1..110: mol_type = other DNA
cttccttcgtacgtctccgaacataaccgggtcactgggatgactggtggtctgacctgggtgacagttcaggacccagtgacccgcgttgagcaccagtgatcttgtaa

SEQ ID NO: 72187 - DNA, 110 bp, synthetic construct
  source 1..110: mol_type = other DNA
aggaatgttctaagtgctttacgtgtacagatccatccacatacgacagccccaggaggcagtactttttctagcttccttatacagagaggaaactgataagaaatttc

SEQ ID NO: 72188 - DNA, 110 bp, synthetic construct
  source 1..110: mol_type = other DNA
caggaccaaatctaaacatcacgcataagtttgacaaaggaaatatagcaggatagtcagggtgggctccctgtaggaggctggtcttggtgtggatctttgaaggtgga

SEQ ID NO: 72189 - DNA, 110 bp, synthetic construct
  source 1..110: mol_type = other DNA
gtcagggtgggctccctgtaggaggctggtcttggtgtggatctttgaaggtggagtggggtgtcagtacacactagataagattttttttttttttgtctttttgatat

SEQ ID NO: 72190 - DNA, 110 bp, synthetic construct
  source 1..110: mol_type = other DNA
aacagccaaggggtcggaggggcccagacagaatttccccactgagccgatccgtgagagctcagttcaagctcctggtttggggaggggggaagtcttctccttaaggg

SEQ ID NO: 72191 - DNA, 110 bp, synthetic construct
  source 1..110: mol_type = other DNA
catgtatgagtacttaattcctttatagtattgaacaggattctgtcgaatggttatataccacgttcgtttatcatggcatcagttaatggacactggggttctttcta

SEQ ID NO: 72192 - DNA, 110 bp, synthetic construct
  source 1..110: mol_type = other DNA
caataaagtgcttcttttttatttttgcagcttgctgtatttatccatccatgccacttgtctatccatcctcccaggaaacagtgtttaaggatgcacttcatcacagg

SEQ ID NO: 72193 - DNA, 110 bp, synthetic construct
  source 1..110: mol_type = other DNA
ggtctgctctggggatttaagccattctggctccctcacaatgatgtctcatctccaacatctccaacctagatgtttccggcaaggagagtcacctttggttctctagc

SEQ ID NO: 72194 - DNA, 110 bp, synthetic construct
  source 1..110: mol_type = other DNA
caacatctccaacctagatgtttccggcaaggagagtcacctttggttctctagctggtgactgttttgtctcctctcaaaattgatttagaacttgaataggaaagaag

SEQ ID NO: 72195 - DNA, 110 bp, synthetic construct
  source 1..110: mol_type = other DNA
agcaacttcatacgggttgagacgcatccatttggctcacatttaatggctgcagcaaaaagaccatgggcaatacaaggtcactcacagcggagttcaaggacaactga

SEQ ID NO: 72196 - DNA, 110 bp, synthetic construct
  source 1..110: mol_type = other DNA
caaaaagaccatgggcaatacaaggtcactcacagcggagttcaaggacaactgaggagactgctaaccgtcttagcaggcaaggcacggaggagagctccctttcccaa

SEQ ID NO: 72197 - DNA, 110 bp, synthetic construct
  source 1..110: mol_type = other DNA
aacctgcatcctcatggatgctatttgggttcgtttaccactgagccacaatgggaactcccggtttgaaattcataaatacttctcgtattggtccagctgttacccta

SEQ ID NO: 72198 - DNA, 110 bp, synthetic construct
  source 1..110: mol_type = other DNA
aactcccggtttgaaattcataaatacttctcgtattggtccagctgttaccctaagaatgttgcatatgaaaccagaggggtccaataaggagcatttacttcctgcac

SEQ ID NO: 72199 - DNA, 110 bp, synthetic construct; identical to SEQ ID NO: 72197
  source 1..110: mol_type = other DNA

SEQ ID NO: 72200 - DNA, 110 bp, synthetic construct; identical to SEQ ID NO: 72198
  source 1..110: mol_type = other DNA

SEQ ID NO: 72201 - DNA, 110 bp, synthetic construct
  source 1..110: mol_type = other DNA
gttttcaggtaaccggagcgtctgcactcactaccgggaggcagaagtccacacgcccatttcacgccctcccccctgcgtgaagctcagagaggtaaagcgatttgaat

SEQ ID NO: 72202 - DNA, 110 bp, synthetic construct
  source 1..110: mol_type = other DNA
ctgcagctctgattcgaccccccacctgggaacttccatatgccacaggggcagccagaggaaaaaaaaatcaaacactccctcgagcccactgcaggcagcacttttcc

SEQ ID NO: 72203 - DNA, 110 bp, synthetic construct
  source 1..110: mol_type = other DNA
cagaggaaaaaaaaatcaaacactccctcgagcccactgcaggcagcacttttcccctgaagatttaggaaaatgcaagcagcttataatagagggattttcttggtaag

SEQ ID NO: 72204 - DNA, 110 bp, synthetic construct
  source 1..110: mol_type = other DNA
tctggggaggggattctcagcccggccacagagctcacggggtgcgccccggctgctcaaggggaaattttggaaaccacattcttatcggctccccacaagtgctcaac

SEQ ID NO: 72205 - DNA, 110 bp, synthetic construct
  source 1..110: mol_type = other DNA
gccttatgaaaagaaaacagcttgtgcctttggtctgctggagtttggcgtagttaaaccagatgaagaaaacgttttctcccagatacgtcattggaaaggggggcagc

SEQ ID NO: 72206 - DNA, 110 bp, synthetic construct
  source 1..110: mol_type = other DNA
ggggcagaaactgttccttctgggttctgggcccctggcttagttagatgtgaatggccaagtccagctcaccacagcctgcatcagctcccgggcagaaagatgccaaa

SEQ ID NO: 72207 - DNA, 110 bp, synthetic construct
  source 1..110: mol_type = other DNA
cagctgacagctactggggcagagcttgggtgcgtgtcgtgattggtcaaagcaggttcaggaataatccagctgccttcatgaaatctcctgagtctagcatcatggct

SEQ ID NO: 72208 - DNA, 110 bp, synthetic construct
  source 1..110: mol_type = other DNA
agccctctgtggatggtcaagtagactggtcagttcttttatatacaacaggatgtcggacatgcttttaatgtatctcggtgtaaattcagtgtgtgccctttagagaa

SEQ ID NO: 72209 - DNA, 110 bp, synthetic construct
  source 1..110: mol_type = other DNA
tcggacatgcttttaatgtatctcggtgtaaattcagtgtgtgccctttagagaaattcttaagaaagtaattgttcatgcatttaacatgttgatagcgttgaccaaag

SEQ ID NO: 72210 - DNA, 110 bp, synthetic construct
  source 1..110: mol_type = other DNA
agttgcctccactaatctttaccaagggaggctggctgcccctcttgggcttccaggcagctggtgggtagctcccctgtggcacttaccctaaggaagctattgatgtg

SEQ ID NO: 72211 - DNA, 110 bp, synthetic construct
  source 1..110: mol_type = other DNA
caacaaacaaccacaaagtaatcattgccaaatccggcaccatgaagttttgccctgtgcttgtttctaaggtttttacagctttgggtcctacctctcacatacgtagg

SEQ ID NO: 72212 - DNA, 110 bp, synthetic construct
  source 1..110: mol_type = other DNA
agttattaattaggtcccagtggttgaaactaatgaactgtgtaataaatatttttgtattttagctctagttggggtatctcaattctgagaaaaagaccagtcgtggc

SEQ ID NO: 72213 - DNA, 110 bp, synthetic construct
  source 1..110: mol_type = other DNA
cagccgcagcccaggcgggaggaggggagccaggcctggggcccatgggaaggatgcagctttgatggtctgtcctggggggctgtgacatgttccagcttcctctcttc

SEQ ID NO: 72214 - DNA, 110 bp, synthetic construct
  source 1..110: mol_type = other DNA
gcaaatacctggcggaggggggttgggggtgagcccaggtgggtggtcaaagcgtaagggacgtcctccatcaaggccacttcaggtcacatgctctctgcagcccagac

SEQ ID NO: 72215 - DNA, 110 bp, synthetic construct
  source 1..110: mol_type = other DNA
gtctctggccgcacctggaggaacggatctcccgggcttggcgctgctgctgtttgggtgactctgtgattgggtggcctgtgtgtggcgggatatttagcagcgtctct

SEQ ID NO: 72216 - DNA, 110 bp, synthetic construct
  source 1..110: mol_type = other DNA
ttccctagtgaggcagctcggactccgggaggtaataggactttttatcaggcgtctcggcacagggaaaggaaccgcagttcacgcccatgtgtcctggattagactca

SEQ ID NO: 72217 - DNA, 110 bp, synthetic construct
  source 1..110: mol_type = other DNA
aggcactcgttttaggaagtagaacctagacaaaccaggctcttgttcccatagaatttacaggggtgataccaaaaaatgctgtatgatagagggtgataattgcatta

SEQ ID NO: 72218 - DNA, 110 bp, synthetic construct
  source 1..110: mol_type = other DNA
gtcaaatgatttgataaaagttttggccattgcacaggttaacttcttgactacagcaagcttccctctttccatatccacagatacacactagcccagatcaaacgaaa

SEQ ID NO: 72219 - DNA, 110 bp, synthetic construct
  source 1..110: mol_type = other DNA
cgtcctttccaaatataagaggaataaagaagtcacttcctcagctgtcatcatcttccaacagattgagcaagaatatttcgagcactgcagaaaaggtgatgcagaac

SEQ ID NO: 72220 - DNA, 110 bp, synthetic construct
  source 1..110: mol_type = other DNA
tagcacgtttcactcttgaagagtcactacaactggctacaacatttaaaaacgtgtattcagtaggtggcaggggtcagaggagctaagtttcttgtgaatcctctcga

SEQ ID NO: 72221 - DNA, 110 bp, synthetic construct
  source 1..110: mol_type = other DNA
ctgagcaagtgaacaagtcaatgaaagtcagcttcctctccctccacaggttggtcagtagaacttttaacactgagaagcctccaacatggtaacaactcagtgctgct

SEQ ID NO: 72222 - DNA, 110 bp, synthetic construct
  source 1..110: mol_type = other DNA
tggggtgatagccacaggctctctctcatgtccctgctgttcctcttgccgccgtgcagcctctcctcaagaggccagagtcaatcggatcactgtctctcttgcttaga

SEQ ID NO: 72223 - DNA, 110 bp, synthetic construct
  source 1..110: mol_type = other DNA
cccgctcccaggctcctgaagtattaaggaagttacgccactgaccaaagaaccctggaaagacgatctcggttcccggggagcacaggctcattcctcctgagacttgg

SEQ ID NO: 72224 - DNA, 110 bp, synthetic construct
  source 1..110: mol_type = other DNA
tggaaagacgatctcggttcccggggagcacaggctcattcctcctgagacttggttttcctggggccacactgacccagctgtagatgatgtggtggccgcagagggtg

SEQ ID NO: 72225 - DNA, 110 bp, synthetic construct
  source 1..110: mol_type = other DNA
cgagggccatcctctttacccggtctaagcttcccatgcccatctcttctagatgcacagacacacagttttatctcttgaggaggggcctggaagttggctgcactttc

SEQ ID NO: 72226 - DNA, 110 bp, synthetic construct
  source 1..110: mol_type = other DNA
cgtctcttttatgagggcactaatcccgttcataagagctccaccctctccaacgaatcatccctcaaagttcccacctcctgatagcatcacccgaggggccagtatct

SEQ ID NO: 72227 - DNA, 110 bp, synthetic construct
  source 1..110: mol_type = other DNA
aatcatccctcaaagttcccacctcctgatagcatcacccgaggggccagtatctcagcatgtgcatttggggagtgggagcattcagaccttatcacctgggaatactg

SEQ ID NO: 72228 - DNA, 110 bp, synthetic construct
  source 1..110: mol_type = other DNA
cgtgcctgcgattgctcagcccgctcccactctgtctccctcattgccttggctttttggctgtcgttgccctccaacatgccatcggttcagttcttttcatgtcctca

SEQ ID NO: 72229 - DNA, 110 bp, synthetic construct
  source 1..110: mol_type = other DNA
tcgttgcaacccaatctgtgtgtggtgaggggccccccctagctacttttttcgcaggtgccagaggcaagcctcgctcttcagtaagacgggggcgtggagtcagagag

SEQ ID NO: 72230 - DNA, 110 bp, synthetic construct
  source 1..110: mol_type = other DNA
gctggtcctgcccaaagcagaattgagcgttagctaaatggccttcagattgttgtgtgcaaaataagcaagatcaaccaacaggcaggtcgaaacagaacctgaaaagc

SEQ ID NO: 72231 - DNA, 110 bp, synthetic construct
  source 1..110: mol_type = other DNA
atctctcaggcgtcctgcccaaggcatcctgacttcccttcaggggctcggcatgggacagaggcgtgagtttgcagctgaggccaccagaagataaaaagagagccacc

SEQ ID NO: 72232 - DNA, 110 bp, synthetic construct
  source 1..110: mol_type = other DNA
ttcttctcacaaagtccggtgatgacaaatagcgtctgcccagctggtgacgggcctcccagggccagagtggttccctgatctgcagggtaacacccccagcaccggga

SEQ ID NO: 72233 - DNA, 110 bp, synthetic construct
  source 1..110: mol_type = other DNA
tttccaagaagagccaaacctctctcagacagtgtcctcagctgtgggcacccgtccgccagggccggtttaagtggaagtgaatttattagaggactctcggaagtgga

SEQ ID NO: 72234 - DNA, 110 bp, synthetic construct
  source 1..110: mol_type = other DNA
tctcaaggacgttgcccaggggacctgtgagctgggcagcttccctccatgtccacatccacacccatcacgcgctttgcctgttccttcctcttcacagtcagcgccaa

SEQ ID NO: 72235 - DNA, 110 bp, synthetic construct
  source 1..110: mol_type = other DNA
ctaaaagcctagtcctcaggcctcctgagtgagaaccggggtgggggttaaagtgcagattcctggctccgcctgacctcttggattccatctctagccctgaagctcag

SEQ ID NO: 72236 - DNA, 110 bp, synthetic construct
  source 1..110: mol_type = other DNA
agtctgaacctcagagcacaagttcagagccaagatcaaaagctcgccagctcaccctgcttggccttccgcccgggcttgagaggcttccagtctccagcgctgacttt

SEQ ID NO: 72237 - DNA, 110 bp, synthetic construct
  source 1..110: mol_type = other DNA
agcatgtctttcccacctagaatgaaagacccctgaagctgagactttaataattgggtttcatcactgactcctcagtacccagaatgtacctgagacagtaagaacag

SEQ ID NO: 72238 - DNA, 110 bp, synthetic construct
  source 1..110: mol_type = other DNA
tccgacacccagctgaatacggaggccgtgggcagcacagctgtggtcctcccacccaggaggacagccggctctcgggaaaactttggaaacatgtgaacgaaaagtag

SEQ ID NO: 72239 - DNA, 110 bp, synthetic construct
  source 1..110: mol_type = other DNA
ggcgtccccactgccagagggggtcgtccggagctggggggccagcaggtcggagcagaaaaggagcatctgtctcacgcgtccgcctggcagaccaccaggtacagagg

SEQ ID NO: 72240 - DNA, 110 bp, synthetic construct
  source 1..110: mol_type = other DNA
aatcaatggggtgttagcagatgcttaaccaccagatttctaggggatgagaggtaagttctgacttgtagcttctgccaattgccgtggtgtaaagctcctaccaccaa

SEQ ID NO: 72241 - DNA, 110 bp, synthetic construct
  source 1..110: mol_type = other DNA
tcgccccacagtttatcagttcttctgctgatgggcatccgggttgttttcatgtggaggtgatacaaataaaatagctatgaaacggccacgtatgtagttttgtacag

SEQ ID NO: 72242 - DNA, 110 bp, synthetic construct
  source 1..110: mol_type = other DNA
cttttagtttttcaaacgcctgaggaagatgttagctgtgggcttgtcgtctatggcctttgttatgttgagagagcttctgttccgtgtttcctcagaacttttatcct

SEQ ID NO: 72243 - DNA, 110 bp, synthetic construct
  source 1..110: mol_type = other DNA
aacacactttagatgagatggcttctttttctaaagcatctgcctttcattcttgctcttactttaatagaacattttgtatttttaaaacgccaaacaatttacctttg

SEQ ID NO: 72244 - DNA, 110 bp, synthetic construct
  source 1..110: mol_type = other DNA
aagtttcatattttatctgaaaaattcatgcgcccagaagctatataagaaaagacagttatgctggactgtacaaaaattaaaggtccttggagttcctgtcgtggctc

SEQ ID NO: 72245 - DNA, 110 bp, synthetic construct
  source 1..110: mol_type = other DNA
atagattgagcagtgtggaaattttaacagtgttaactctcccagtccgtgtcgttccatttgtttgtttttttcagtttctttcattaatgtcttaaccgttttcattg

SEQ ID NO: 72246 - DNA, 110 bp, synthetic construct
  source 1..110: mol_type = other DNA
aaaaatccctgttttaatgtgtcagaaaattactgactggcaagaggctctttatgccgagctcctcgtccagagcgtggcttttcctttaaagagagcaaaccgtgctt

SEQ ID NO: 72247 - DNA, 110 bp, synthetic construct
  source 1..110: mol_type = other DNA
tgcctggactaacttagggggaagaaaaatgccactggattgtagttggttcagtgagcctcaatcccggagcgcctcagagggggtccctgggacagtcctcaaacccc

SEQ ID NO: 72248 - DNA, 110 bp, synthetic construct
  source 1..110: mol_type = other DNA
ctggcaggaaactcagaggcgtgctctttgtgtgtttagtgtgcccaggactcacggtgtcccaggcccacgtggccccagctgtctgccgctgtttgggaaagtctaac

SEQ ID NO: 72249 - DNA, 110 bp, synthetic construct
  source 1..110: mol_type = other DNA
ggactggtttctcttatttcacctccatttgtgctcctttcaatcaaggctctgccctcaaagaggcaagctagtaatggtggagctgagcctgtgtgttccacagctta

SEQ ID NO: 72250 - DNA, 110 bp, synthetic construct
  source 1..110: mol_type = other DNA
gcttggctcagggagatctttattgggagtaagaaaggctttgctttggcgggtggctggtgctttgcattcgtcacatggccgatttgctgacctggctctggcccagg

SEQ ID NO: 72251 - DNA, 110 bp, synthetic construct
  source 1..110: mol_type = other DNA
cccggcatcgcatccagactgcaggcagagacaccatgcgtggcaggcagaacggtggcctgcaaagacgcccacgtccccatccccgggcctgtgacgatgtcacctga

SEQ ID NO: 72252 - DNA, 110 bp, synthetic construct
  source 1..110: mol_type = other DNA
cagccagcaggctccattcgcaaggggtttgctgggttctcctgcacacctttgtgtcaacaaagaaaaaagacatcactaatggccaaatcaaataccccagttgtgtc

SEQ ID NO: 72253 - DNA, 110 bp, synthetic construct
  source 1..110: mol_type = other DNA
gtcaacaaagaaaaaagacatcactaatggccaaatcaaataccccagttgtgtcaagattccccaggtgtggagtgcagcactcggcgccccttgtaaattccacggcg

SEQ ID NO: 72254 - DNA, 110 bp, synthetic construct
  source 1..110: mol_type = other DNA
acctggatttcctgaacgctgcacacacgtctaccttgtttcgagtaatcgcagataccactcaacactctcgcttcctttccatcagaacatttcacggagcgcctgct

SEQ ID NO: 72255 - DNA, 110 bp, synthetic construct
  source 1..110: mol_type = other DNA
taccactcaacactctcgcttcctttccatcagaacatttcacggagcgcctgctttgtgctcgaaaccaccaggggtgctggggagacagaagcaaacagtgcaagggg

SEQ ID NO: 72256 - DNA, 110 bp, synthetic construct
  source 1..110: mol_type = other DNA
atgctacctgtgaacctggcacatgtgttcaccccgtgaccatcccccagatcggcacagctcttccatgagcccggagggcccacgcctcccaccaggaggaggcgcgc

SEQ ID NO: 72257 - DNA, 110 bp, synthetic construct
  source 1..110: mol_type = other DNA
agaagaaaggaaaaaaaaaaagcaagcgtgagcgtgcctgctgtggcgcccggtgcactcactcccagcgtgcagccgcgatgccagaggcccttccccaggagcaggca

SEQ ID NO: 72258 - DNA, 110 bp, synthetic construct
  source 1..110: mol_type = other DNA
cgccaaagacgagcccagacaccgacctcggcctccgcggaacgaacgcaaaatggagcgcgacctcaaggcaaagcgcaaacggtaacaccctcaagcatcacaacccc

SEQ ID NO: 72259 - DNA, 110 bp, synthetic construct
  source 1..110: mol_type = other DNA
gagcgcgacctcaaggcaaagcgcaaacggtaacaccctcaagcatcacaacccccggcccagacggcttggccccgaagacctccgccaccacacccgaggtgcagccg

SEQ ID NO: 72260 - DNA, 110 bp, synthetic construct
  source 1..110: mol_type = other DNA
taagtccggctctgggcatcctcagctttctgagctgcaaagcccaaatcaggaccctcatcctctaaggttaggaaactggcgcccagtgacgccaaatgacttgcctc

SEQ ID NO: 72261 - DNA, 110 bp, synthetic construct
  source 1..110: mol_type = other DNA
cggtcttgcttgtcttaggaccgaaacggacacacctgtggtcacctggtccttgcagtgactggggcttatctacctcttagtcctcacggttggaagcaggagtcagt

SEQ ID NO: 72262 - DNA, 110 bp, synthetic construct
  source 1..110: mol_type = other DNA
agcaacgtacagttttggaagtcggtcccttgcagcacgtgttcgtgtccgtgggacctgtgatggcaggacaggtcacctagaagagttgcctggggcctagcagcttc

SEQ ID NO: 72263 - DNA, 110 bp, synthetic construct
  source 1..110: mol_type = other DNA
gggccctttaaaggaagtgcatccctcacctccgaatccccagcagcctcgggctcctaggctgttcaccccattctccggacggctgatgcctcagggcctttgcacct

SEQ ID NO: 72264 - DNA, 110 bp, synthetic construct
  source 1..110: mol_type = other DNA
aacaagcatgtggcccccatggcgccctctggacctaaaaccggaacccctcacgggcttgccatgaagatgctgtgtggtgggtgcaaagggcacgtatacaacaggcg

SEQ ID NO: 72265 - DNA, 110 bp, synthetic construct
  source 1..110: mol_type = other DNA
cccgcccccgacctcagggctcgcccagctggtcctcagccacgaagctctttcttcaaattatactggctttaccccccgctccatctttgagatgataagacacaaaa

SEQ ID NO: 72266 - DNA, 110 bp, synthetic construct
  source 1..110: mol_type = other DNA
tcaaattatactggctttaccccccgctccatctttgagatgataagacacaaaaatctatcttgccatttttgcaaagaacagcaaaacaatcacgtgtcccctggccc

SEQ ID NO: 72267 - DNA, 110 bp, synthetic construct
  source 1..110: mol_type = other DNA
cattgcctaaatcccccaagcaaaagtccagagattcacctccgcagcaaatccacagacctgattatcgaggtgggatctgctgcagataagctaattcttggtagagc

SEQ ID NO: 72268 - DNA, 110 bp, synthetic construct
  source 1..110: mol_type = other DNA
cagacctgattatcgaggtgggatctgctgcagataagctaattcttggtagagccctcacgtggaggtgggtgaaaatgtgttgatctctaagtcaatcatgtgtccat

SEQ ID NO: 72269 - DNA, 110 bp, synthetic construct
  source 1..110: mol_type = other DNA
ctgccatcatctggttgtggagctagtgtgacagtttccctgagttcctatgactcttttttttttttttttaagtcacagccctgtcatttgtatgttccttggctagg

SEQ ID NO: 72270 - DNA, 110 bp, synthetic construct
  source 1..110: mol_type = other DNA
gtgtgacagtttccctgagttcctatgactcttttttttttttttttaagtcacagccctgtcatttgtatgttccttggctaggggttgaattggatcttcagctgaac

SEQ ID NO: 72271 - DNA, 110 bp, synthetic construct
  source 1..110: mol_type = other DNA
gttgtaccattttccaaccccttgggcagagttggaaagttccagttgctctatggcctccccaatactgatctcatcagcctgtttaattttagccaatttgaagcaag

SEQ ID NO: 72272 - DNA, 110 bp, synthetic construct
  source 1..110: mol_type = other DNA
cgggtgtgagaggtgaaaagcgtgggactacagcacttacctgtccatccagcatccgcagggcagaactacaattagaagtcttttttgtttgttttaattaagtaatt

SEQ ID NO: 72273 - DNA, 110 bp, synthetic construct
  source 1..110: mol_type = other DNA
atgtcttggccaaatcactgcctctattgactcatagcctgggtaaggttgcctagtcaaggatggagctatttagggaaagctgtaattgatggggatatttcggttct

SEQ ID NO: 72274 - DNA, 110 bp, synthetic construct
  source 1..110: mol_type = other DNA
tgtgaaaagcaaaagaaaataatggcacaaaatcaaaatgaatgctttttcttcctggttgcagctttaggggggtcactccaaagataaaagccgcagggcgttaggct

SEQ ID NO: 72275 - DNA, 110 bp, synthetic construct
  source 1..110: mol_type = other DNA
tggttgcagctttaggggggtcactccaaagataaaagccgcagggcgttaggctgcacgggggtgggggttggggggctccaggacgtccccccatccccaccccatag

SEQ ID NO: 72276 - DNA, 110 bp, synthetic construct
  source 1..110: mol_type = other DNA
ctgagaagggcacccgcaggggggatccagcctcagggaggtgggccccggagtgcctggaggttttgctccctgtgggctggattctggcatcgatcagcggcgtgtgg

SEQ ID NO: 72277 - DNA, 110 bp, synthetic construct
  source 1..110: mol_type = other DNA
gcctttgccgactcaggaagtgcaggatggagccaggagcatccttttcccggcgtgaacggaaaccaggttctaagcagctgagaatccagccccggcttctccttgtg

SEQ ID NO: 72278 - DNA, 110 bp, synthetic construct
  source 1..110: mol_type = other DNA
tggatgtgcagtggtgcctctcgggggttgatttgcattccctggtggccgatgtcaccttcacctgattgtgtgcacttcctcccagctccacgtgtagtgagatgttt

SEQ ID NO: 72279 - DNA, 110 bp, synthetic construct
  source 1..110: mol_type = other DNA
aattatcttggaccttcagattaggtaagtttgtgttatgtcatagttatcaacgtgtgatgccacttagccgtctttacccataaggtgggaggtaaaacgagcccctt

SEQ ID NO: 72280 - DNA, 110 bp, synthetic construct
  source 1..110: mol_type = other DNA
gacaacacagaaccagggaccctggcctagcttgacttcgtaaaagcagggagacccttcaagccatcgggggaaccccccctgcagggtgcaggctctgcgaggggacg

SEQ ID NO: 72281 - DNA, 110 bp, synthetic construct
  source 1..110: mol_type = other DNA
ctgcccctgccctgcagcgttcctaggcttcacattttcttctgtgtggttggagggtcagttgcaggtggcacctcagtatccctcagtatttccgcatgttttcctag

SEQ ID NO: 72282 - DNA, 110 bp, synthetic construct
  source 1..110: mol_type = other DNA
catcctgtaattcggtccccgatagctgtgtttctgctgcttttggcatgttgctgtagtttctgggcaactcttctcaagctcggcctctcacctgagcacacgccggg

SEQ ID NO: 72283 - DNA, 110 bp, synthetic construct
  source 1..110: mol_type = other DNA
ctgaggctctgcgcctgccgtgatccttggagcacgggtggccgggggtggccgggctcaccagccacatcagaagtcaccacaccaggtggattttacctccaagccgg

SEQ ID NO: 72284 - DNA, 110 bp, synthetic construct
  source 1..110: mol_type = other DNA
ttcagcaggtatttttaaacatgtgctctgtaaaaagtgtttatcaaacactacggaaaacacacaagggaatgagctatgggccctgccccctatgcacctacagtctt

SEQ ID NO: 72285 - DNA, 110 bp, synthetic construct
  source 1..110: mol_type = other DNA
gctccaatttttccgaaactgccaactctcaaaagagaggaagcctttggtgaaaggccgtcggcgtgtgcgtttggcagccccacgcgatgagccacatggggccacct

SEQ ID NO: 72286 - DNA, 110 bp, synthetic construct
  source 1..110: mol_type = other DNA
ggcacacacttagcagcctgctgtgtttgtacgtgtcagtcaggtgcacggttcggtctgtttatggatgcatcgctctcttctccctcggcacagtgagccttgggcgc

SEQ ID NO: 72287 - DNA, 110 bp, synthetic construct
  source 1..110: mol_type = other DNA
tcaagcttctgtgcttgcagaccctgagtcacagctctgagtttcgagggagcgcaggatgcaaagtgttttaagacattaaggctacactaacaatatctagttctccc

SEQ ID NO: 72288 - DNA, 110 bp, synthetic construct
  source 1..110: mol_type = other DNA
taattttatagactttataaacaggagactgttgaactatggtaataacctttgtaataaaatcggtggaaccagaaaacacatgccacccggagatttgctggtgacgt

SEQ ID NO: 72289 - DNA, 110 bp, synthetic construct
  source 1..110: mol_type = other DNA
aataaaatcggtggaaccagaaaacacatgccacccggagatttgctggtgacgtggcaaaagacttaaaaggagtggcagggctggagggaccggtgtccaccacgcca

SEQ ID NO: 72290 - DNA, 110 bp, synthetic construct
  source 1..110: mol_type = other DNA
agaagggcccccggagcacggcctggtggctgtggccaggctctatttgtcacgttcaaggccatctacttaccagccacgtttatgagtctctagtagcatctgtctct

SEQ ID NO: 72291 - DNA, 110 bp, synthetic construct
  source 1..110: mol_type = other DNA
gtcacctggaccacctcctaacgcgcggcagctgtgcagtcaatacttggtggattaaggacgttgtgcagaaataaaaaaaacagagggtatccagacagtgtcaaaat

SEQ ID NO: 72292 - DNA, 110 bp, synthetic construct
  source 1..110: mol_type = other DNA
gggttgcgagactggaggggggacaggccagtccctgagtgtccagcacggccactgctcgccacctcaattccattcacatttatggtctttcaggactccgttgtcag

SEQ ID NO: 72293 - DNA, 110 bp, synthetic construct
  source 1..110: mol_type = other DNA
tgctcgccacctcaattccattcacatttatggtctttcaggactccgttgtcaggatggacaatccccaaaagttccatagatttttcccaccatcatatccttgtttt

SEQ ID NO: 72294 - DNA, 110 bp, synthetic construct
  source 1..110: mol_type = other DNA
cgcaggacgtccagctgtgcgcttggccagttgtcggaaagggagccaacctcggaggacctggggaggagctggtgggattggcgaggaaggaagtgggtgaagtggac

SEQ ID NO: 72295 - DNA, 110 bp, synthetic construct
  source 1..110: mol_type = other DNA
aggacctggggaggagctggtgggattggcgaggaaggaagtgggtgaagtggactgcagtgaggacagcagccaaggagacaggccgccagggcgaggccccgtgggca

SEQ ID NO: 72296 - DNA, 110 bp, synthetic construct
  source 1..110: mol_type = other DNA
tgtgttcgcataacctcatgcttcgagatgtcaaataagatgagaaggttcatgagattgttcgtttaaaactcttagagcgtcttgaagatgacagctcagaaatacaa

SEQ ID NO: 72297 - DNA, 110 bp, synthetic construct
  source 1..110: mol_type = other DNA
tgaggaaatgctccagccagtttctggaagcagacacggcggtgagagcaatctgagcagctgggcacccactctgccgtgggatccgagacagcggcttagcccaggtg

SEQ ID NO: 72298 - DNA, 110 bp, synthetic construct
  source 1..110: mol_type = other DNA
tgagggtacatgtcactgacccggcctcccaaacagtctctctggctacaacgcgaatgggcaaagggacaggtgccagaggctttcctacagcaggacatcgctttact

SEQ ID NO: 72299 - DNA, 110 bp, synthetic construct
  source 1..110: mol_type = other DNA
cgacaactcagcgaccatcaacaggggcccagagagatgtcaccgtaattctacttgggtttttgttttttgcttttttttgctttttagggccgtacctgcagcacata

SEQ ID NO: 72300 - DNA, 110 bp, synthetic construct
  source 1..110: mol_type = other DNA
catcaacaggggcccagagagatgtcaccgtaattctacttgggtttttgttttttgcttttttttgctttttagggccgtacctgcagcacatagaggttcccaggcta

SEQ ID NO: 72301 - DNA, 110 bp, synthetic construct
  source 1..110: mol_type = other DNA
cggggataaagaaggaggcagctgaacaggagaaagcagtcgaagggtcaggaaacactgcagcagccacggagggcactgagagggcaggcccaggaggaggagcaggg

SEQ ID NO: 72302 - DNA, 110 bp, synthetic construct
  source 1..110: mol_type = other DNA
cgcaggtctgggccgcgaggacagcggcaaggccccggcagccgtcctcggccacttccttctgcgggcatccttagccctgggtcggcctatgtttggagtttattatt

SEQ ID NO: 72303 - DNA, 110 bp, synthetic construct
  source 1..110: mol_type = other DNA
cagccgtgcttcctctgaggccccagctgcctccgaagcctgggagctcggccgccttctgtccccggatttaggcatggtggcggctgcaggctggcaggttctaggag

SEQ ID NO: 72304 - DNA, 110 bp, synthetic construct
  source 1..110: mol_type = other DNA
tctggaagcagcactcgctgctgagcaggctgggtctccggaggggtggggtgcggtgggctggggatgcaccctgattgactgctgcagggattcagccagagccacgg

SEQ ID NO: 72305 - DNA, 110 bp, synthetic construct
  source 1..110: mol_type = other DNA
cagggcgtagaggcagtattttataataactttatatggagcataacctatagagatatcaaaccactgtcatacacctgaaatgaatataatattgtaccaggacgcta

SEQ ID NO: 72306 - DNA, 110 bp, synthetic construct
  source 1..110: mol_type = other DNA
atatcaaaccactgtcatacacctgaaatgaatataatattgtaccaggacgctacttcaatatgaaaacaataagtacaatctttaaaaagcaaggacatgctgacacc

SEQ ID NO: 72307 - DNA, 110 bp, synthetic construct
  source 1..110: mol_type = other DNA
atggaaagtgtaaccctgaactctgtgtcttagtccgctcgggctgctgtcaccgaacaccacgaagtgtgcggcttaaacttcagaccttcatccccacggttctggag

SEQ ID NO: 72308 - DNA, 110 bp, synthetic construct
  source 1..110: mol_type = other DNA
acttgggaaactccagagcaaaaggacgtctgttgcatttacctccgtttctgctctttctgtggttccttcttcctggtgcatggagtccttcttttgtcctttcctta

SEQ ID NO: 72309 - DNA, 110 bp, synthetic construct
  source 1..110: mol_type = other DNA
ctttctgtggttccttcttcctggtgcatggagtccttcttttgtcctttccttaacgtttgaaaaacctcctttagccatgcttgaagggtaggtctgttggcgacaga

SEQ ID NO: 72310 - DNA, 110 bp, synthetic construct
  source 1..110: mol_type = other DNA
caatttgtttagttttccttaagacagcacaacatgtctccgagatagaagcagataactgtagataaaagggcttcagctattcttttttttcctttctgccttttcta

SEQ ID NO: 72311 - DNA, 110 bp, synthetic construct
  source 1..110: mol_type = other DNA
ccttgcgtagaggatgtcttgccaagcgctgcagccccagtgtcagcagagcccggtgcccagaggtctctgtcatatgggatgcatgcatctccctgttgtggctgggc

SEQ ID NO: 72312 - DNA, 110 bp, synthetic construct
  source 1..110: mol_type = other DNA
gggccgatgggaacggtcagccagcagacggcacattcttagctctaccaccggcttataagaatgtctctctctcctcctcctcatcagctttagataactatcatcaa

SEQ ID NO: 72313 - DNA, 110 bp, synthetic construct
  source 1..110: mol_type = other DNA
ttataagaatgtctctctctcctcctcctcatcagctttagataactatcatcaaaatgttcaattcctgccaatctaataggtgaggcaggttcttatctttgcttcat

SEQ ID NO: 72314 - DNA, 110 bp, synthetic construct
  source 1..110: mol_type = other DNA
cacggctatactgttaccaccttaggctctggtgagatggagtcgtgtggtctcatgtgtgggaacagcttggtacagtgtctgctaagcttgatgcccacttgaaggca

SEQ ID NO: 72315 - DNA, 110 bp, synthetic construct
  source 1..110: mol_type = other DNA
gagttgactttgggtccttcaaacttgctaagctcacttagttttagaggcttgttttgtagattgtttgggatttctataatcatgacatccgagaatggggaaaattt

SEQ ID NO: 72316 - DNA, 110 bp, synthetic construct
  source 1..110: mol_type = other DNA
gtctcctgtcttctgcgtctcagcgtcgcctgcactttgggactcacagcaacacacacctgagaaaatcctcctttgcccacgtccattttctgccctcttcccagcag

SEQ ID NO: 72317 - DNA, 110 bp, synthetic construct
  source 1..110: mol_type = other DNA
acacctgagaaaatcctcctttgcccacgtccattttctgccctcttcccagcagagaggggctctgcccggtgtccttgtctcctctccctgccccgaaagctgtccat

SEQ ID NO: 72318 - DNA, 110 bp, synthetic construct
  source 1..110: mol_type = other DNA
ttgatgcccagcacaacaccagtgacttagcaggtctctggaaatatttttgattgaatcaaagagttttaatagctattacatacctcctgtgtgttcagcaagagtga

SEQ ID NO: 72319 - DNA, 110 bp, synthetic construct
  source 1..110: mol_type = other DNA
ttacttcaggctttcgccagtaagcaccggactgaagcgccccccccccccccgcatttatcctacttggaatttacagaaattattcacgctgtggcttggccatgtct

SEQ ID NO: 72320 - DNA, 110 bp, synthetic construct
  source 1..110: mol_type = other DNA
atttatcctacttggaatttacagaaattattcacgctgtggcttggccatgtctttcatcagcttctggacattttgagtcattatcttcccacagagttttccttgag

SEQ ID NO: 72321 - DNA, 110 bp, synthetic construct
  source 1..110: mol_type = other DNA
ctttgtcatttattttttgatagcaactgattgtattggttttgtatgtctaggaatgtctttatttcactaccattctggaaagatagtttaactgggtacagaaatct

SEQ ID NO: 72322 - DNA, 110 bp, synthetic construct
  source 1..110: mol_type = other DNA
ggttcttttgtgccattttcccttattgaaaagcgtctgaggcttcagaaattttagatgaacatcaggctcttcaagccaatactttccgcgtcctgcgaggatgccat

SEQ ID NO: 72323 - DNA, 110 bp, synthetic construct
  source 1..110: mol_type = other DNA
agatgaacatcaggctcttcaagccaatactttccgcgtcctgcgaggatgccatgagcatggcccgtccagcctctgtctccttctgtttctggcgcaaaagggcccca

SEQ ID NO: 72324 - DNA, 110 bp, synthetic construct
  source 1..110: mol_type = other DNA
atcacgcaaggcagcccactcgtgggaggatgcatggagctgcttgtcggccgtgttcaatctgacaagaacagcggggtctggacaaactctgtctgccctccatcctc

SEQ ID NO: 72325 - DNA, 110 bp, synthetic construct
  source 1..110: mol_type = other DNA
ctcgtgagggaccaagacaacgttctgagaaaagccaggatgtgtctctgagggaaacggcccccacaaggctggtttctcgcgttcatttgttccattcccgcctccga

SEQ ID NO: 72326 - DNA, 110 bp, synthetic construct
  source 1..110: mol_type = other DNA
aacggcccccacaaggctggtttctcgcgttcatttgttccattcccgcctccgagtcaaagtccatctgcaggaacagctacacgtccgcgtgtcccgctgtcatcgga

SEQ ID NO: 72327 - DNA, 110 bp, synthetic construct
  source 1..110: mol_type = other DNA
ctgtagccccgtgactccttgagcaacagtaggtcatctgtctccatctgtccccacccatccctccgtttcctgcacaggcgtgaagctctgcctttgcattgacctag

SEQ ID NO: 72328 - DNA, 110 bp, synthetic construct
  source 1..110: mol_type = other DNA
acccatccctccgtttcctgcacaggcgtgaagctctgcctttgcattgacctagaaaagtgacctgaaaaattggaccttggagtagtttccttattgtgattatacat

SEQ ID NO: 72329 - DNA, 110 bp, synthetic construct
  source 1..110: mol_type = other DNA
ttgtgaagattcagcggcatgttccatccattttgtgttgtgttgctgtgtgggggcaccctcagtgctagggaaagtgtacaggtctgcctgcgcccacgtgaggtggt

SEQ ID NO: 72330 - DNA, 110 bp, synthetic construct
  source 1..110: mol_type = other DNA
ctcggggcagtggccacaccgaaaatcagcaaggaggagcccggacagtgggaggtcagcaagcccaggacgattggttaaaccgtcttagtccccttggtttatttttg

SEQ ID NO: 72331 - DNA, 110 bp, synthetic construct
  source 1..110: mol_type = other DNA
aagtgtcagaaactaaaagactaaaggtgggaagggctggctgtggcgcagcaggttaaggtctctgctgaggagcaggttcgattcccagcccagaaactgccagatgc

SEQ ID NO: 72332 - DNA, 110 bp, synthetic construct
  source 1..110: mol_type = other DNA
ttaaggtctctgctgaggagcaggttcgattcccagcccagaaactgccagatgccacaggtgcggccaaaaagtaaaaagacaagtggtgaccagggcgggttcagcat

SEQ ID NO: 72333 - DNA, 110 bp, synthetic construct
  source 1..110: mol_type = other DNA
gtcaagcgagacaatttctagtcctagccctttttcaggaaactgagcagcttggcacaagtccctggatctttgggggccttgctcctcccgtctgtaaaataaggaac

SEQ ID NO: 72334 - DNA, 110 bp, synthetic construct
  source 1..110: mol_type = other DNA
atacattttttaataaggattgaattggatagcttctgaaaatggcagattaagtcatggggaacaactctttcgctgagaacatttagataagctgcccaaaatataag

SEQ ID NO: 72335 - DNA, 110 bp, synthetic construct
  source 1..110: mol_type = other DNA
ttagtagatggacgttaaatcctcatactggtcattatacatggaaaatattatatcacttgttaggatagaaaaaggaatgcgatcagctgtgcatggattacatgttt

SEQ ID NO: 72336 - DNA, 110 bp, synthetic construct
  source 1..110: mol_type = other DNA
tcacttgttaggatagaaaaaggaatgcgatcagctgtgcatggattacatgtttggacggcgtcatgttctcacttccccccggaaggatgtgacgggtgatgcttctc

SEQ ID NO: 72337 - DNA, 110 bp, synthetic construct
  source 1..110: mol_type = other DNA
gggtacaaagctctggaaaacttcagcttttcctgcagtccatctaggagagttagaaccttaggacacgtcctaaaagagtttgttttcttaaaagaaaggcattttca

SEQ ID NO: 72338 - DNA, 110 bp, synthetic construct
  source 1..110: mol_type = other DNA
taacacaactgggacatttcttgaatgaatgtgtccatttcaactgcccttctcggtctggactcctaaaccccctaaggctagggcagtgctttccagctttttgaggt

SEQ ID NO: 72339 - DNA, 110 bp, synthetic construct
  source 1..110: mol_type = other DNA
cctgggctcctccacgtccccaaattcagcagcttctcaaggacagtttctagatccctccgcccctcactgctctgagctgccacttcatatagaaatgacggtccttt

SEQ ID NO: 72340 - DNA, 110 bp, synthetic construct
  source 1..110: mol_type = other DNA
ccctccgcccctcactgctctgagctgccacttcatatagaaatgacggtcctttaaaaagtcactaggtcatttttttcagtcaaggtcaactcagagggaacacagaa

SEQ ID NO: 72341 - DNA, 110 bp, synthetic construct
  source 1..110: mol_type = other DNA
tgggttcatctgggtgtgaaggtgccttggctgaactgacacttgagaaacagatgaaagatgaagtgagatggctggtggtgtgtgcagacgggagggaggaaggacag

SEQ ID NO: 72342 - DNA, 110 bp, synthetic construct
  source 1..110: mol_type = other DNA
atttccagaatctgacccctcctcactgtctctaccactgccattggtcaaagaccacagtctctcctgatttgctgtgatcgtcacctccccaccatcttctctcaata

SEQ ID NO: 72343 - DNA, 110 bp, synthetic construct
  source 1..110: mol_type = other DNA
cacagtctctcctgatttgctgtgatcgtcacctccccaccatcttctctcaatatagcagcttgtggtatcttttcctcctatttccaatcatgttattctgatcaaaa

SEQ ID NO: 72344 - DNA, 110 bp, synthetic construct
  source 1..110: mol_type = other DNA
cctggactatccccgaggttgtctgttagcagctattcatcctctgtctggagaaggcaggctcccaactatgtttcctgcaatagccctcttctacctccatctgcgct

SEQ ID NO: 72345 - DNA, 110 bp, synthetic construct
  source 1..110: mol_type = other DNA
ggcaggctcccaactatgtttcctgcaatagccctcttctacctccatctgcgctggcccttgcgctgagctgctgagtgacagcagtaacagagcatgggccatccctt

SEQ ID NO: 72346 - DNA, 110 bp, synthetic construct
  source 1..110: mol_type = other DNA
gtcggcttcctggagggtggaaaggattcttgccaggttcgttcctttgcactctttctctctccaccttagctcacatatctccaccacatttcccatttcctacaaca

SEQ ID NO: 72347 - DNA, 110 bp, synthetic construct
  source 1..110: mol_type = other DNA
ctggaaaatggataaaacgcccccagctgcatccagcggacacacatctcatactcagcatctccgaagaacccacaaatgtctgctcctgtctgagaagatgcaaaatc

SEQ ID NO: 72348 - DNA, 110 bp, synthetic construct
  source 1..110: mol_type = other DNA
tgtgtgtgtgtgtgtgtgtgtttctaattgtgtgtgcgtgctcatccatgccccttgcatattgctagctctcctagcctgggttcccagcagagactgaggttaagggt

SEQ ID NO: 72349 - DNA, 110 bp, synthetic construct
  source 1..110: mol_type = other DNA
tgcatattgctagctctcctagcctgggttcccagcagagactgaggttaagggttaacgtgttgttactttagtaagacatgcgattccagggaggaggaggaggggga

SEQ ID NO: 72350 - DNA, 110 bp, synthetic construct
  source 1..110: mol_type = other DNA
ctgcataaatctagaggatgccatttacattatagtctattttggacaaaaatgtgaagaaaccctgacaccacatccaatccttacattctaatttttcttctcaactg

SEQ ID NO: 72351 - DNA, 110 bp, synthetic construct
  source 1..110: mol_type = other DNA
caccaggagattaggagggagggttgatgagcataggttccttagaagagagtcttccgagggccggatgtttcccttcctccggtgggagcttcccttctctaaccacc

SEQ ID NO: 72352 - DNA, 110 bp, synthetic construct
  source 1..110: mol_type = other DNA
tccgagggccggatgtttcccttcctccggtgggagcttcccttctctaaccaccagcatcacctgctccagccaagcaaagggctcttgagaaaaccatgtggagggca

SEQ ID NO: 72353 - DNA, 110 bp, synthetic construct
  source 1..110: mol_type = other DNA
agatcaagtgaaaaaatctaagtaaaagtagaatttacactactgtgaaccgctgaaaagtatatatgaactccatttattttaaagtggtaaatgattactgcctaccc

SEQ ID NO: 72354 - DNA, 110 bp, synthetic construct
  source 1..110: mol_type = other DNA
ggggtcaccctgtactataattgcagtgaggattgagagaagcgaatggacccggggatatcttgcagatagaactcttgttaattggttagatgtggaccgaaacagag

SEQ ID NO: 72355 - DNA, 110 bp, synthetic construct
  source 1..110: mol_type = other DNA
cggaagaatgcctttatatttgatgatcaagaataagattagaacaggtgtaagggaatttggttacaaagcaagctttggttggtttgagcaaatgaaactcttccagt

SEQ ID NO: 72356 - DNA, 110 bp, synthetic construct
  source 1..110: mol_type = other DNA
ggacaggcagagccaccatcaagctgtcctccgagctttatctcgggctgtgttctgaaagggggcagggggcggcagggcggtgctctcctgtgctggtgaggaagttc

SEQ ID NO: 72357 - DNA, 110 bp, synthetic construct
  source 1..110: mol_type = other DNA
tgaaagggggcagggggcggcagggcggtgctctcctgtgctggtgaggaagttcagaaagtgtgtttgaacatacacatgcccaggcaggagaaagattctgtcttccc

SEQ ID NO: 72358 - DNA, 110 bp, synthetic construct
  source 1..110: mol_type = other DNA
tagccaataatgatgctcctgctgtggactgcagaaaccaggggtcaaaatatataagaaatcaagtctttcacttgaattattttacttactatcctcatggacgcatg

SEQ ID NO: 72359 - DNA, 110 bp, synthetic construct
  source 1..110: mol_type = other DNA
aagaaatcaagtctttcacttgaattattttacttactatcctcatggacgcatgattgtcccatatctgctctaacagaacctttgggagacagacatgaagactgaag

SEQ ID NO: 72360 - DNA, 110 bp, synthetic construct; identical to SEQ ID NO: 72358
  source 1..110: mol_type = other DNA

SEQ ID NO: 72361 - DNA, 110 bp, synthetic construct; identical to SEQ ID NO: 72359
  source 1..110: mol_type = other DNA

SEQ ID NO: 72362 - DNA, 110 bp, synthetic construct
  source 1..110: mol_type = other DNA
cagcaggtgctggaggcagacagaccagggtcctagttctgactcttgctgggctttgggcaacctcaaactttccgtgcccgtctgtcttgttggtgaaacagtaatgc

SEQ ID NO: 72363 - DNA, 110 bp, synthetic construct
  source 1..110: mol_type = other DNA
ttgggcaacctcaaactttccgtgcccgtctgtcttgttggtgaaacagtaatgctaacagtacctcccccacaggcctggtgacaatcaaaggggtcccctaaagcatc

SEQ ID NO: 72364 - DNA, 110 bp, synthetic construct
  source 1..110: mol_type = other DNA
gaaacatggtttcagattgagtcattgaaccccacccccagtcttcacacctcgtcgcacctatcaaggccttcctgttgctctgaggccaaagacaccatcttgaatgt

SEQ ID NO: 72365 - DNA, 110 bp, synthetic construct
  source 1..110: mol_type = other DNA
aggaatgacctggcttctctggtcccttcccatcgttcaaagctcagcgtaaatctcagctccccttaccagcctgctgcttcttttcaatcatttgtgggaaaccttac

SEQ ID NO: 72366 - DNA, 110 bp, synthetic construct
  source 1..110: mol_type = other DNA
tcagctccccttaccagcctgctgcttcttttcaatcatttgtgggaaaccttactgcacacacaccatgtccttctttgggctgctcattctccccccccttttttttc

SEQ ID NO: 72367 - DNA, 110 bp, synthetic construct
  source 1..110: mol_type = other DNA
ggaactgggattacttatgcctggtgggtgatctctgcaacagtgcctctttctttccttttgtatttgtaaagcctgtccttgcaattggccttgggcactgtcctgca

SEQ ID NO: 72368 - DNA, 110 bp, synthetic construct
  source 1..110: mol_type = other DNA
tccttttgtatttgtaaagcctgtccttgcaattggccttgggcactgtcctgcagctggcgcagtatcatgagggcccttcattcttctcgccagggctgaatccatct

SEQ ID NO: 72369 - DNA, 110 bp, synthetic construct
  source 1..110: mol_type = other DNA
gtaatgacataggtattccaagaatagcatttcagttttacagcagctgcatttcacgtctccatatagcatatgctcctgtggctcagtactttagggggagaaatagg

SEQ ID NO: 72370 - DNA, 110 bp, synthetic construct
  source 1..110: mol_type = other DNA
tgctctccctccatgtcccccgatgtaggcttgacagcttggggttcagcacggccatcccgccggctcctctatctgtgcctcagctctgatgggtccctacgaacaga

SEQ ID NO: 72371 - DNA, 110 bp, synthetic construct
  source 1..110: mol_type = other DNA
catcccgccggctcctctatctgtgcctcagctctgatgggtccctacgaacagacacatgtctgcctgacttcacacaccatttacccttgttgccaggctccttctca

SEQ ID NO: 72372 - DNA, 110 bp, synthetic construct; identical to SEQ ID NO: 72370
  source 1..110: mol_type = other DNA

SEQ ID NO: 72373 - DNA, 110 bp, synthetic construct; identical to SEQ ID NO: 72371
  source 1..110: mol_type = other DNA

SEQ ID NO: 72374 - DNA, 110 bp, synthetic construct
  source 1..110: mol_type = other DNA
aagggagaaatgtgttctactccttcccttccctacttaacaaacacaacataaaacttcctgtctcttcaacacacacacacacacacctttttctttaacacaaaaca

SEQ ID NO: 72375 - DNA, 110 bp, synthetic construct
  source 1..110: mol_type = other DNA
acttcctgtctcttcaacacacacacacacacacctttttctttaacacaaaacacagacacaagaagacacattgagttttactcacccccacctctgttaatagtttt

SEQ ID NO: 72376 - DNA, 110 bp, synthetic construct
  source 1..110: mol_type = other DNA
aaacaaagcaacaataaaatatgattatcctatttgaggaaaatatgttttctgccagtggatttaaaaaacttttagtctgcaaaatgaggggaggggtcagagcatgt

SEQ ID NO: 72377 - DNA, 110 bp, synthetic construct
  source 1..110: mol_type = other DNA
cagtggatttaaaaaacttttagtctgcaaaatgaggggaggggtcagagcatgtcctagttcaatgttgatttctttttttaaagaaaagcattaaaacatgaaattgt

SEQ ID NO: 72378 - DNA, 110 bp, synthetic construct
  source 1..110: mol_type = other DNA
ggaagagtccaaaatctgcttctttatgatgagaagtagctgaggggatataatagacttagacacaagcttcttgcttcaattccaccttcacttccattcagaggtgg

SEQ ID NO: 72379 - DNA, 110 bp, synthetic construct
  source 1..110: mol_type = other DNA
atcttagtttacatggtttttatagattttctaatttctgctgccatttaaacacattaccaaaaatggcaaggttttctgggttttctttgtccctccctttcacacat

SEQ ID NO: 72380 - DNA, 110 bp, synthetic construct
  source 1..110: mol_type = other DNA
ggcaactaaggaaggaagagaggcttaagagctgggtgtgatagcaacagaggtagataccataacagggatgtcatcaagagagagataaaagagtaaaatagagcctg

SEQ ID NO: 72381 - DNA, 110 bp, synthetic construct
  source 1..110: mol_type = other DNA
tgagaaagtgacgctttataaaaaagagatcactatctttttgattaaaagccggatacaccaaacacaaaagtgacctaaaccaggaccatcacactttccccacagat

SEQ ID NO: 72382 - DNA, 110 bp, synthetic construct
  source 1..110: mol_type = other DNA
gcacattcaagggacatttaagtttcattgggttttctttcctttcacatttccaccttcagccagtcctgatgttacataaggcagatactctgcataatattaaggta

SEQ ID NO: 72383 - DNA, 110 bp, synthetic construct
  source 1..110: mol_type = other DNA
gctccaaactagcctttactactaagggggccagtattgggaattccgtctgcctgattctttctctctctctctccattggttctgaattccatggaaaggagagtgga

SEQ ID NO: 72384 - DNA, 110 bp, synthetic construct
  source 1..110: mol_type = other DNA
tggacctggtcatggatcatgtatggaagccttagcattcaagtaagaagctccaatctctccccaagtgggcctgctgcccccagtgggctggagggaacctctcctgt

SEQ ID NO: 72385 - DNA, 110 bp, synthetic construct
  source 1..110: mol_type = other DNA
ttaggtggtttaacaaatctgaaatggtgtagatgctgcatcctagtggtgaaatcggatgtttacagtttgtctgtgaacctctctgtgccttcattcctggccaagaa

SEQ ID NO: 72386 - DNA, 110 bp, synthetic construct
  source 1..110: mol_type = other DNA
cggatgtttacagtttgtctgtgaacctctctgtgccttcattcctggccaagaatactttctcctgttttctcatcaagctccacattctctatgaacaattttctgag

SEQ ID NO: 72387 - DNA, 110 bp, synthetic construct
  source 1..110: mol_type = other DNA
gagacccttcagagatttcttttctttctctctgccatagtaaccaacaatatttccagatagtagctgtcttctgggatccccaagtaaggatgacaataatgtggacc

SEQ ID NO: 72388 - DNA, 110 bp, synthetic construct
  source 1..110: mol_type = other DNA
gaatcagaacgtagctgagagctgggtggttgtggatctgaagctgccattttcttgaaggattttttttctgattaaaaaatgaagcagttcagcagagatggcgagaa

SEQ ID NO: 72389 - DNA, 110 bp, synthetic construct
  source 1..110: mol_type = other DNA
taggaaacaagaaaggcctatactctcacgtccatgcatttatcctccaagcccactgcctgaaatgcccacccctctttatccacaaagcttttcttcaacctttttaa

SEQ ID NO: 72390 - DNA, 110 bp, synthetic construct
  source 1..110: mol_type = other DNA
ctgcctgaaatgcccacccctctttatccacaaagcttttcttcaacctttttaagcagcttgaccattaaatacttatacaagccttcctgcctttcccagaacctgtg

SEQ ID NO: 72391 - DNA, 110 bp, synthetic construct
  source 1..110: mol_type = other DNA
ttcccaagactttatgtgcaggagcaggagttctggcctgaaaggcttgtgtggtagtctctacacattttttctcagatgctaagtatgttatgcctcatacatgataa

SEQ ID NO: 72392 - DNA, 110 bp, synthetic construct
  source 1..110: mol_type = other DNA
ctccgccagcatgatctcgctctgcagttgcttccaagtgggtcacagccattgtcatcttgttctcagttatcttccaggctatctttaaagacttccttcccttccct

SEQ ID NO: 72393 - DNA, 110 bp, synthetic construct
  source 1..110: mol_type = other DNA
catcttgttctcagttatcttccaggctatctttaaagacttccttcccttccctgtgctattggccacttggcctcacctaccggggtgcccctctgcagatcctgctg

SEQ ID NO: 72394 - DNA, 110 bp, synthetic construct
  source 1..110: mol_type = other DNA
ttgggcctttccttcttcccgaatcccatggcacaaacctcacatttcctcaggaagtccttcttgatgaacccatcccacttgtgtcatcctgatggtttttctccaat

SEQ ID NO: 72395 - DNA, 110 bp, synthetic construct
  source 1..110: mol_type = other DNA
agtccttcttgatgaacccatcccacttgtgtcatcctgatggtttttctccaatgccagaagaaaatggtgtgctttataagttaaatgccattttctggtatgtttct

SEQ ID NO: 72396 - DNA, 110 bp, synthetic construct
  source 1..110: mol_type = other DNA
attattcatcatcaaaccaagtttttgttccaccctggacatagtgagacaaggacatcaaagcgacaccgacagctggacgctggtgagggttggattcgccccctggc

SEQ ID NO: 72397 - DNA, 110 bp, synthetic construct
  source 1..110: mol_type = other DNA
catcaaagcgacaccgacagctggacgctggtgagggttggattcgccccctggctctgtgactcatcacattcacaggtgacttctcagagggacttgttgctattcca

SEQ ID NO: 72398 - DNA, 110 bp, synthetic construct
  source 1..110: mol_type = other DNA
gcccagtggaaggcatttgactttagcatcaccgagtcctctctcctgaggtttggagattatttcgtctccttaaccagagagctcagggttcccctccaatcttgcca

SEQ ID NO: 72399 - DNA, 110 bp, synthetic construct
  source 1..110: mol_type = other DNA
ccccagggaccagtgcttgtcccatccctcaccagctcagtgacctcgagcaaattactcaacctctgtgatcctgtttcttcatctgtaagagaggcataggggttgtt

SEQ ID NO: 72400 - DNA, 110 bp, synthetic construct
  source 1..110: mol_type = other DNA
cccaataaaatctagttgatgtaatatgcttagggtctagccagataatactacgtttaaaacctgtcttaattttgcttttgtttttcgctaaacatggtaattaagaa

SEQ ID NO: 72401 - DNA, 110 bp, synthetic construct
  source 1..110: mol_type = other DNA
tgttcattgacttattatttagttctggagctgggcatcgaggatgaaagattgtgagaatgacatagcgctgctcttggggtgatcctagggagaaacatctaaatatg

SEQ ID NO: 72402 - DNA, 110 bp, synthetic construct
  source 1..110: mol_type = other DNA
gcaggggagtactcggggtatacagaccaaaggggttttgtgtactgagggagttgtgagaggaaattggtcatcgctcgtcatcgtggtggacagtgactcagggagct

SEQ ID NO: 72403 - DNA, 110 bp, synthetic construct
  source 1..110: mol_type = other DNA
gtgagaggaaattggtcatcgctcgtcatcgtggtggacagtgactcagggagctgtgatgaggggtcagcaaggcacgtggccgccgtctctgaggtctctgctcccta

SEQ ID NO: 72404 - DNA, 110 bp, synthetic construct
  source 1..110: mol_type = other DNA
gctcaatccggatggactttcagactttaacttttctttgggagtttttttgaggggggggggggggctagtccggccccaaagaagcaaggtccactgcacagttgttt

SEQ ID NO: 72405 - DNA, 110 bp, synthetic construct
  source 1..110: mol_type = other DNA
ggggggggggggctagtccggccccaaagaagcaaggtccactgcacagttgtttccgttgcaggtggcagatatggaggaaatgccagtgccaaatcctcactttttcc

SEQ ID NO: 72406 - DNA, 110 bp, synthetic construct
  source 1..110: mol_type = other DNA
ctctctacctgcaacctcttcctactctaaactctaatagcactttatgcagactttttttgcatttactccttaatgtacagagctcatgttcttttgctaaactttaa

SEQ ID NO: 72407 - DNA, 110 bp, synthetic construct
  source 1..110: mol_type = other DNA
aaatgtcaactgaattgtggccagcaggtggagacagtttctaaccaaactagagtagcaaaatttgagttcaagttgtagtggaaaattaaactatctttttagatcct

SEQ ID NO: 72408 - DNA, 110 bp, synthetic construct
  source 1..110: mol_type = other DNA
tagcaaaatttgagttcaagttgtagtggaaaattaaactatctttttagatccttaccttgaaatatttagttaactagataggacgacgtgatttgtttcccctactt

SEQ ID NO: 72409 - DNA, 110 bp, synthetic construct; identical to SEQ ID NO: 72407
  source 1..110: mol_type = other DNA

SEQ ID NO: 72410 - DNA, 110 bp, synthetic construct; identical to SEQ ID NO: 72408
  source 1..110: mol_type = other DNA

SEQ ID NO: 72411 - DNA, 110 bp, synthetic construct
  source 1..110: mol_type = other DNA
gtgtgccagatgcttcacgaactcttcctgacagcacgttaacagacagcagaggtcacgaccaccgtcattttccaggtgagggaacaattcagagaattaccgcccac

SEQ ID NO: 72412 - DNA, 110 bp, synthetic construct
  source 1..110: mol_type = other DNA
atgtagccacatgcacagggtgagaggccctgggaagccgggcctcacaccctctcgcccgggcgtggcgctggcacactgcctgaaataaccagcctggcaagtggtct

SEQ ID NO: 72413 - DNA, 110 bp, synthetic construct
  source 1..110: mol_type = other DNA
cgcccgggcgtggcgctggcacactgcctgaaataaccagcctggcaagtggtcttctgttgctgtctccattgtttcccagggccctccctctgtgacatgcgatcccg

SEQ ID NO: 72414 - DNA, 110 bp, synthetic construct
  source 1..110: mol_type = other DNA
catcacctcagggctgcaggagaatgaaagcagagccttgaacatggcccagcttgactccggtgccctctctggctcagaacatcctcagcgtcggtgttgaccctgct

SEQ ID NO: 72415 - DNA, 110 bp, synthetic construct
  source 1..110: mol_type = other DNA
tccatggggatgcagtttctatccctggcttcatttagtgggttaaagatccagcgttgctgtggccatggtgtaggctgcccgctgcagctctgattcgacccctagtc

SEQ ID NO: 72416 - DNA, 110 bp, synthetic construct; identical to SEQ ID NO: 72415
  source 1..110: mol_type = other DNA

SEQ ID NO: 72417 - DNA, 110 bp, synthetic construct
  source 1..110: mol_type = other DNA
gtggggatctaggcaaacagattcgcatggttctcacgttttatacctggttctgttccactcagtagggctccaaaccagatagaagttgagctataaatcctccagtc

SEQ ID NO: 72418 - DNA, 110 bp, synthetic construct
  source 1..110: mol_type = other DNA
ttccactcagtagggctccaaaccagatagaagttgagctataaatcctccagtcaggagtaaacagtgtgttttcaggagctttagagaacaggtgtcaagaaggaatt

SEQ ID NO: 72419 - DNA, 110 bp, synthetic construct
  source 1..110: mol_type = other DNA
cttggtccacttctttgctgcaggcagacaaagaaccaaagagactacgtagccataacactcagaaaatgcggccataacactgtgatgtttaggccatttttatttta

SEQ ID NO: 72420 - DNA, 110 bp, synthetic construct
  source 1..110: mol_type = other DNA
taacactcagaaaatgcggccataacactgtgatgtttaggccatttttattttagcttcgtcctgttttactggtccctctgaacctccccacatctctatgagtagtc

SEQ ID NO: 72421 - DNA, 110 bp, synthetic construct
  source 1..110: mol_type = other DNA
ccttccagtgatatttggacctttatgtagaggtggaattaaactataatactatgcatctctctagcagttagcaaaggctgcctagttagttctctcctctctctcgt

SEQ ID NO: 72422 - DNA, 110 bp, synthetic construct
  source 1..110: mol_type = other DNA
cagtgtgtctgtggcattatttttaaaataaaagctattttgaaaagctacatttgttgtgttgttgccattattgctgatctgaatgttatctccagggctcttggcca

SEQ ID NO: 72423 - DNA, 110 bp, synthetic construct
  source 1..110: mol_type = other DNA
tatgcagcacttttataaattggcacccagttagggctgtccatgtgggctcacgccttcatctagctctgagttcaaggaactttgtggagcaaaaattgcttgtgtaa

SEQ ID NO: 72424 - DNA, 110 bp, synthetic construct
  source 1..110: mol_type = other DNA
gcgtggatatcttgcctaaaatgaaagcctaaaatatattctgaaaaaagccacggtaacaccactttgggcatagcaaaggtgacagatgttgctgggaggagcgctgt

SEQ ID NO: 72425 - DNA, 110 bp, synthetic construct
  source 1..110: mol_type = other DNA
gttttcagggtacattacatttttcccttaaaataagatttccttgctgtctacttctgcaaagaatgccagctttaccattgttttcctaccttcttccccacacaaag

SEQ ID NO: 72426 - DNA, 110 bp, synthetic construct
  source 1..110: mol_type = other DNA
gagacttaacctggacacatggactgttttccctcagaatcaaattagcgatcccattacaacttcatcattagtatttgctcaggcatatctgtgaatatttcatggct

SEQ ID NO: 72427 - DNA, 110 bp, synthetic construct
  source 1..110: mol_type = other DNA
aaaatgttgtcagaagacactgtaatgcagcttctgctcataaagcctaacaatgcctccagaaaagcaaaacctagtacggaaaaaaaaaaacatctttttctctgttc

SEQ ID NO: 72428 - DNA, 110 bp, synthetic construct
  source 1..110: mol_type = other DNA
aagaagaaagttgtctgtctagccacaggtttgagtagcttgccgtagaggtagttacgaaagagaagccaaaaggaaattctctaaaataagcactcaggagaactact

SEQ ID NO: 72429 - DNA, 110 bp, synthetic construct
  source 1..110: mol_type = other DNA
gactttcctgttaggtgtatttcatcatcttcattctgaatcccaaatactgaccattggagctcctgtcatggctcagcggttagtgaaaccatctagcatccatgagg

SEQ ID NO: 72430 - DNA, 110 bp, synthetic construct
  source 1..110: mol_type = other DNA
acacggacatggatgttctcttgccctcagcatactgattcctaggcctttagatccagactggaacctacagcactgactcgctataccagcagctttcctgcatctcc

SEQ ID NO: 72431 - DNA, 110 bp, synthetic construct
  source 1..110: mol_type = other DNA
ccagactggaacctacagcactgactcgctataccagcagctttcctgcatctcccatgtgccgatggcagatggtgggacttctcaggctccaaaatcatgtgagccaa

SEQ ID NO: 72432 - DNA, 110 bp, synthetic construct
  source 1..110: mol_type = other DNA
tgtcagaatagaattgaattttgactacccagagctaatgtcagactccacagattcaagggtccagtcccacaggactgccgtcacctcagatgccagtaccaggtccc

SEQ ID NO: 72433 - DNA, 110 bp, synthetic construct
  source 1..110: mol_type = other DNA
gaaggagagggaagacacatcttttatttcaaaagagtgcatagtgtttttatcttcagtcagcttgtgctagtctctgtctgatatattcttactgagtttcaaaaata

SEQ ID NO: 72434 - DNA, 110 bp, synthetic construct
  source 1..110: mol_type = other DNA
tctttttatactttaaagtcaaaaccaaagtcttctactgtctataagggccaatatcttctacctttatctacctcttactcatgttctaacttcttggtttctcactg

SEQ ID NO: 72435 - DNA, 110 bp, synthetic construct
  source 1..110: mol_type = other DNA
atcttctacctttatctacctcttactcatgttctaacttcttggtttctcactgttgttcaaacattccagacatatttctgagttagattcttggcactggccattgt

SEQ ID NO: 72436 - DNA, 110 bp, synthetic construct
  source 1..110: mol_type = other DNA
cacacactgaatggcttaaacagcagacatacaacacctcagagatcatcttatatatctaggatatcaccctcttgcctctttggagtaaattttcctcttcccacatt

SEQ ID NO: 72437 - DNA, 110 bp, synthetic construct
  source 1..110: mol_type = other DNA
aaatgcatatccatgtatgtgcaaatacatactttttttctcctcctatacatgcagccccaggtctgtcaaagagcatttcttgtgtaccttcaaagcatttcattatc

SEQ ID NO: 72438 - DNA, 110 bp, synthetic construct
  source 1..110: mol_type = other DNA
agccccaggtctgtcaaagagcatttcttgtgtaccttcaaagcatttcattatccactagctataaagaaaattgtatatgaaaacaacctttattcaatttgaataca

SEQ ID NO: 72439 - DNA, 110 bp, synthetic construct; identical to SEQ ID NO: 72437
  source 1..110: mol_type = other DNA

SEQ ID NO: 72440 - DNA, 110 bp, synthetic construct; identical to SEQ ID NO: 72438
  source 1..110: mol_type = other DNA

SEQ ID NO: 72441 - DNA, 110 bp, synthetic construct
  source 1..110: mol_type = other DNA
ttatactcttggctgcaatgattcagtctctcatcttcccagagggcaacactctccatggtcatctgaaggtctggcattttaccttgtcaggttttaccgcattctcc

SEQ ID NO: 72442 - DNA, 110 bp, synthetic construct
  source 1..110: mol_type = other DNA
gtcttctagactcaggcgataccaagagttcacatcatgcgtgttccacagcatcagctctgaattcgtgagattttgtcctatgtcctcggaccacacctgtgtgactc

SEQ ID NO: 72443 - DNA, 110 bp, synthetic construct
  source 1..110: mol_type = other DNA
agctctgaattcgtgagattttgtcctatgtcctcggaccacacctgtgtgactcccactgctggagggcttttgcagtgtttgattgaagaaagatcaaaagccatgtg

SEQ ID NO: 72444 - DNA, 110 bp, synthetic construct; identical to SEQ ID NO: 72442
  source 1..110: mol_type = other DNA

SEQ ID NO: 72445 - DNA, 110 bp, synthetic construct; identical to SEQ ID NO: 72443
  source 1..110: mol_type = other DNA

SEQ ID NO: 72446 - DNA, 110 bp, synthetic construct
  source 1..110: mol_type = other DNA
aagcaaatatgaaggagttctgtaccacgagactagccttacaagaaatgttaaagggccttctttaggctaaaatgaaagggtgctaattagtaacaggaaaacatgaa

SEQ ID NO: 72447 - DNA, 110 bp, synthetic construct
  source 1..110: mol_type = other DNA
atttatactgcctctatcagagtcataaatcctcagggacatctacctgattggcccagctccagtcaggtgctcacctctggtctaatcacctgctgccaacagagcag

SEQ ID NO: 72448 - DNA, 110 bp, synthetic construct
  source 1..110: mol_type = other DNA
ttcctacaaccttgaggtgatattaaaggcttttcatgatttgagtcctctgtgctcctggagcatgcgccctagctccaggagagccaagtgagtctttgttcacaata

SEQ ID NO: 72449 - DNA, 110 bp, synthetic construct
  source 1..110: mol_type = other DNA
tcctggagcatgcgccctagctccaggagagccaagtgagtctttgttcacaatatttttgccatgctgtgtggctgtgtcctatgtccttccatgagaggtaacaacac

SEQ ID NO: 72450 - DNA, 110 bp, synthetic construct
  source 1..110: mol_type = other DNA
actgtatttcataaaatatcatgatgtaattgtttgcgggtatgactacttactgttatctcctcccatagtaagtttgcttcgtaaagacaagaaccaagccaatctca

SEQ ID NO: 72451 - DNA, 110 bp, synthetic construct
  source 1..110: mol_type = other DNA
ttatctcctcccatagtaagtttgcttcgtaaagacaagaaccaagccaatctcactcaccattgtaataccagcagggttagacactcagtaaatgatctgttgaattt

SEQ ID NO: 72452 - DNA, 110 bp, synthetic construct; identical to SEQ ID NO: 72450
  source 1..110: mol_type = other DNA

SEQ ID NO: 72453 - DNA, 110 bp, synthetic construct; identical to SEQ ID NO: 72451
  source 1..110: mol_type = other DNA

SEQ ID NO: 72454 - DNA, 110 bp, synthetic construct
  source 1..110: mol_type = other DNA
aacttctttttgaggtcatggtgacttgatgtggcagcttcatagaattgaccattagcttacatttcatagctacgtggtgtcatagtgacacagaaacatagtagaca

SEQ ID NO: 72455 - DNA, 110 bp, synthetic construct
  source 1..110: mol_type = other DNA
atggcttgagactgagaagaaaaataaatggacctggcggaagcatgtgacaaaagctctatggaaaagtacctttcctacaatgctgactctgtagctcacagctaatt

SEQ ID NO: 72456 - DNA, 110 bp, synthetic construct
  source 1..110: mol_type = other DNA
gctctatggaaaagtacctttcctacaatgctgactctgtagctcacagctaattaatcccacaatagaatgtgagttggctagttgtattttgagtgtcctcatgtggc

SEQ ID NO: 72457 - DNA, 110 bp, synthetic construct; identical to SEQ ID NO: 72455
  source 1..110: mol_type = other DNA

SEQ ID NO: 72458 - DNA, 110 bp, synthetic construct; identical to SEQ ID NO: 72456
  source 1..110: mol_type = other DNA

SEQ ID NO: 72459 - DNA, 110 bp, synthetic construct
  source 1..110: mol_type = other DNA
tcacatgctcaaattctattctttccatggaactgcatatttctctaggtgacatctcagctcatgcccacatacatccattattcccaaggcaggaaccctcttacaca

SEQ ID NO: 72460 - DNA, 110 bp, synthetic construct
  source 1..110: mol_type = other DNA
ctcagctcatgcccacatacatccattattcccaaggcaggaaccctcttacacaaggacccatcgggatggcttgacttggtttctttctgaagtatcctcttgccata

SEQ ID NO: 72461 - DNA, 110 bp, synthetic construct
  source 1..110: mol_type = other DNA
ctggtcccaagtgacaggtgggcccagtcatacaagccatttaagagctgtttctcagtcactgtagccttgtgggtctcatggaaatgagttccactggtatttaaatc

SEQ ID NO: 72462 - DNA, 110 bp, synthetic construct
  source 1..110: mol_type = other DNA
cagtcactgtagccttgtgggtctcatggaaatgagttccactggtatttaaatctagattgtctctgtagcacaggtcttaaaagttgggttctccagcatggggttta

SEQ ID NO: 72463 - DNA, 110 bp, synthetic construct
  source 1..110: mol_type = other DNA
tccttaatttggtatatgggtatttaagacttagcttgattacctcactattgagccccatgatatgcatcttaaaacattcttttagtttattttctgcttataggctc

SEQ ID NO: 72464 - DNA, 110 bp, synthetic construct
  source 1..110: mol_type = other DNA
tggatccatacagttcagacccatgctagccaagggtcattgtaattactgccgtgtaaaaattactataaacttggaagcttaaaacagatatttactatcctaaaact

SEQ ID NO: 72465 - DNA, 110 bp, synthetic construct
  source 1..110: mol_type = other DNA
tttttcatccaatttctttcaggatgtgctgtaggtcagcaatgtccagtggctaatgactcaacccttgcacaataggatgacaggcaacattctttgttttatagggt

SEQ ID NO: 72466 - DNA, 110 bp, synthetic construct
  source 1..110: mol_type = other DNA
atgactcaacccttgcacaataggatgacaggcaacattctttgttttatagggttaaaatctttgtcatcttgacaagtggctcaaacactcctcttagaaatatgttt

SEQ ID NO: 72467 - DNA, 110 bp, synthetic construct
  source 1..110: mol_type = other DNA
tgaaagtctgaaaagggagtctcaaaagaacccacaaaaaaatgagagctgttctatggatgccaaacataacaaaaagtatcactagccaagttgcaatagcaccagtc

SEQ ID NO: 72468 - DNA, 110 bp, synthetic construct
  source 1..110: mol_type = other DNA
ataaccttacaaaactaaagttgttaaccctatagagatattgtgagggaaatcagacaaaaaggttgaaaatgctttgaaaactacagtgtctaacataattgcccaac

SEQ ID NO: 72469 - DNA, 110 bp, synthetic construct
  source 1..110: mol_type = other DNA
ctaactttttttataatagggaaaaagattacttattcagccttatttgctgctaaccctttcctgctactattacatggtaatcaaaaaacatttggttttttcctcac

SEQ ID NO: 72470 - DNA, 110 bp, synthetic construct
  source 1..110: mol_type = other DNA
accctttcctgctactattacatggtaatcaaaaaacatttggttttttcctcacatttggcagattcatcattatttttcaagaccaacttgaaagtcctaaatgaagc

SEQ ID NO: 72471 - DNA, 110 bp, synthetic construct
  source 1..110: mol_type = other DNA
atgagttggtttcttcctactgtgctggacacaggacaaggcttcaaacttgttaaatcttaatttggaacccagagtggaatattactgagagtacgtactaccagtta

SEQ ID NO: 72472 - DNA, 110 bp, synthetic construct
  source 1..110: mol_type = other DNA
gcctctgtcccctggccttccctatccagctgccatagctgacatctgaaaaggacccagaggtagggcagagctgcagcacagatgcctagcaaccctgctgactggac

SEQ ID NO: 72473 - DNA, 110 bp, synthetic construct
  source 1..110: mol_type = other DNA
cccagaggtagggcagagctgcagcacagatgcctagcaaccctgctgactggactgggcagtgatacaaacatgacataaacttttattaagccactaagatttcaagg

SEQ ID NO: 72474 - DNA, 110 bp, synthetic construct
  source 1..110: mol_type = other DNA
ttaaaaaaactctgttctcataactggtcaacacctttcaatgatagctctggttagggtcaatgcaaagccgtcttttttacttgaaatcctttattattttaaagctt

SEQ ID NO: 72475 - DNA, 110 bp, synthetic construct; identical to SEQ ID NO: 72474
  source 1..110: mol_type = other DNA

SEQ ID NO: 72476 - DNA, 110 bp, synthetic construct
  source 1..110: mol_type = other DNA
cctcctttgtctttaaaacctgctgggtagtatcttcacatccctctctgtgtctagctgctttcacttgtaaggaccccttcgtttacactgggctcacctggatgatc

SEQ ID NO: 72477 - DNA, 110 bp, synthetic construct
  source 1..110: mol_type = other DNA
agctgctttcacttgtaaggaccccttcgtttacactgggctcacctggatgatcccagataatctctccatctcagtatccttaatttaatcacctctgccaagtccct

SEQ ID NO: 72478 - DNA, 110 bp, synthetic construct
  source 1..110: mol_type = other DNA
tgggatggtgctctgtgccttgtttaggatcttctgagccgctttcacgatgtgcctagaaagctaacgacagggctctgctgcttctgctattttcctgaacgttgaca

SEQ ID NO: 72479 - DNA, 110 bp, synthetic construct
  source 1..110: mol_type = other DNA
ttttacaagcccacctctcccctgccaacttctattcttttccttcattatcatgtacagccgtgagtggttagatgtatttacagtttttcaactgttccttctgtttt

SEQ ID NO: 72480 - DNA, 110 bp, synthetic construct
  source 1..110: mol_type = other DNA
acagccctaaccccactaactggtatctgcatttcattcagaatgtcttatagactgtaaagctctcacaagcaaaaaagaaaatatccaaagtttctttcaggtctttg

SEQ ID NO: 72481 - DNA, 110 bp, synthetic construct
  source 1..110: mol_type = other DNA
tgactctgccatagtttcaatgtgaggtgaagggcttctgaagttatcatgctcgctcagcagaaaaaacgtcaaattataaatttttcaggaaaaatagtatttaagtg

SEQ ID NO: 72482 - DNA, 110 bp, synthetic construct
  source 1..110: mol_type = other DNA
gcatttctgataattcatagactcacacaaccaaaaataattacttaaaaagcccttacatattttccatttgctaagttccaccttcaattccgcattactagagtttt

SEQ ID NO: 72483 - DNA, 110 bp, synthetic construct
  source 1..110: mol_type = other DNA
ttacatattttccatttgctaagttccaccttcaattccgcattactagagttttatttttgcctctcatcccctctctgcaggaggtcttcctggcctctctatcctcc

SEQ ID NO: 72484 - DNA, 110 bp, synthetic construct
  source 1..110: mol_type = other DNA
cttgtggaccagcaggcccagtgaagacccctgccaagccagcccctgctcccgtgcttgctggagagctgagtgcttgccctccagtgcgccaccttttcttcagtcca

SEQ ID NO: 72485 - DNA, 110 bp, synthetic construct
  source 1..110: mol_type = other DNA
acaggcccaacggtccaggctaacaatgaggtactgcagccgaaacacagagcacatgttggttaaggttgagcaggttaccaggagacagagagctgggaggagtcttc

SEQ ID NO: 72486 - DNA, 110 bp, synthetic construct
  source 1..110: mol_type = other DNA
atgttggttaaggttgagcaggttaccaggagacagagagctgggaggagtcttcctatccaaaggtcgtcgcaaggacacagggaagaatgagccagagaaacagaagc

SEQ ID NO: 72487 - DNA, 110 bp, synthetic construct
  source 1..110: mol_type = other DNA
ttattgttaatctgctgactatttattcaatactcaatgaagtcatagatcatacatttacatatatttgagaacatctcttcagtattgcctatctgggatctgggttg

SEQ ID NO: 72488 - DNA, 110 bp, synthetic construct
  source 1..110: mol_type = other DNA
atttacatatatttgagaacatctcttcagtattgcctatctgggatctgggttgacataactattgccttctctctccatcctcagacccccttccggcctgccatgct

SEQ ID NO: 72489 - DNA, 110 bp, synthetic construct
  source 1..110: mol_type = other DNA
tggcagctcccatccttgctttttagagagcatgcatcaaagaaatcataggcagcttttcaatttttcccaaggagaggggccattgttccaacaaggcaagaagcaca

SEQ ID NO: 72490 - DNA, 110 bp, synthetic construct
  source 1..110: mol_type = other DNA
cttttcaatttttcccaaggagaggggccattgttccaacaaggcaagaagcacagtttgctagaagataataaagcacaccaactttgagaagagagatgggcctcgca

SEQ ID NO: 72491 - DNA, 110 bp, synthetic construct
  source 1..110: mol_type = other DNA
agagggagaaagggggacaaaagaaggaacagtcttagacaaggcaggagagggtgggatgcaggaacgtggaggcaaggccgggacaggaaggaccacctggacacatt

SEQ ID NO: 72492 - DNA, 110 bp, synthetic construct
  source 1..110: mol_type = other DNA
ttgtcctctagtattcttactgggaactaatactacatttgccacagtctacccttcccctgattacttcagcttatactctcattgggctagggaaaagcagagaggga

SEQ ID NO: 72493 - DNA, 110 bp, synthetic construct
  source 1..110: mol_type = other DNA
tacaaatgtgtggaaaggtattagtaaacttaagagtagctttttatcaccaaagcatggagtctaattgactggattataatctaagctccacctcttaaaagtgggaa

SEQ ID NO: 72494 - DNA, 110 bp, synthetic construct
  source 1..110: mol_type = other DNA
gccactattgatttaaacctgctgatcaggagctggtaccgggaacatgtttctgcatatcccactctatagattgcagtttactcaaatttcatggcagtctaggataa

SEQ ID NO: 72495 - DNA, 110 bp, synthetic construct
  source 1..110: mol_type = other DNA
ctgactggcttggtttctctctgaataggccaagttgagggtgggactctagtgagcatgtttgaaccttctggaatcatgaataccctaaacttgtggaagctcaggcc

SEQ ID NO: 72496 - DNA, 110 bp, synthetic construct
  source 1..110: mol_type = other DNA
gcatgtttgaaccttctggaatcatgaataccctaaacttgtggaagctcaggccatttgtatgcctcctaagatcttcacatttggctgcattctatcccatcacattc

SEQ ID NO: 72497 - DNA, 110 bp, synthetic construct
  source 1..110: mol_type = other DNA
ctgtgattctcttttacgacagttgactcatttagttttgagtttgtttttaaatacctaagaaactacagctgggcaaaccactcgagttgcctgtcccgctgtggcat

SEQ ID NO: 72498 - DNA, 110 bp, synthetic construct
  source 1..110: mol_type = other DNA
acctaagaaactacagctgggcaaaccactcgagttgcctgtcccgctgtggcatgctctatccattcaggcctcaggcctcacggctctgaaatcggtgcgccaagaca

SEQ ID NO: 72499 - DNA, 110 bp, synthetic construct
  source 1..110: mol_type = other DNA
cctccccatggaacgtctcttgtcttcttcccattgtctcagctgttgccctggtggagcccatcttcatctctagcagcccacagaccattgagctccttgccctccta

SEQ ID NO: 72500 - DNA, 110 bp, synthetic construct
  source 1..110: mol_type = other DNA
ggagcccatcttcatctctagcagcccacagaccattgagctccttgccctcctatccctctatagccggctgccagaacgaattgccccaaacacccctctgattcaaa

SEQ ID NO: 72501 - DNA, 110 bp, synthetic construct
  source 1..110: mol_type = other DNA
gagcccaagagatgacagtgatgggagaggagcgtctgtctcactgtgcctccctccctctctgtgcagcagtcacatcccatgtctccgcttccctctaacccacagct

SEQ ID NO: 72502 - DNA, 110 bp, synthetic construct
  source 1..110: mol_type = other DNA
ccctctctgtgcagcagtcacatcccatgtctccgcttccctctaacccacagctcctactctatgggctgctgttcctcttccggtgctcttccttcacccaggtcact

SEQ ID NO: 72503 - DNA, 110 bp, synthetic construct
  source 1..110: mol_type = other DNA
tcaggaacacaaagctagcgagttagggccagggttcaaatccagagaggtcccagaaagacatttataactcaaaacatcattttggatggaataagagtatcccgaaa

SEQ ID NO: 72504 - DNA, 110 bp, synthetic construct
  source 1..110: mol_type = other DNA
ggtttccagcccatgagaaagccaggcagtgctgtgtcctctaactggtgggagagaattctggtgcttttttgccatagagcttacacactatttccttttccaggaag

SEQ ID NO: 72505 - DNA, 110 bp, synthetic construct
  source 1..110: mol_type = other DNA
ggcttccttctctcctgcttcatcagaggctgggctctcctcgctcttggtttctccgttttctgcaggcggatcgtctttcgtctcttgcttggtcccttcggtctgtt

SEQ ID NO: 72506 - DNA, 110 bp, synthetic construct
  source 1..110: mol_type = other DNA
ccgttttctgcaggcggatcgtctttcgtctcttgcttggtcccttcggtctgttttcccttcgctcccctttttccttttgtttgtgcttttttgtctgaagctttatc

SEQ ID NO: 72507 - DNA, 110 bp, synthetic construct
  source 1..110: mol_type = other DNA
gctgtgctgaagctgatttggcttctggatttgaaggaggagctgtgctgaggcgcagcatggctgagctggtcagcactgtctggtgcctataggtggagttgcatcaa

SEQ ID NO: 72508 - DNA, 110 bp, synthetic construct
  source 1..110: mol_type = other DNA
atgttcaacagccctaccttgtgtcagtatcatgtggcttcagttgttgagccagtccaacaacaatttcctaaatgctctactgttcattatatggatgatatactttg

SEQ ID NO: 72509 - DNA, 110 bp, synthetic construct; identical to SEQ ID NO: 72508
  source 1..110: mol_type = other DNA

SEQ ID NO: 72510 - DNA, 110 bp, synthetic construct
  source 1..110: mol_type = other DNA
cccacaggtctcccgaggaaagggaacgcttcgacatgtcttctctccaccttacagcagctcagggaacggaccgttgtgctcaatggacagatggggaaagaggtcca

SEQ ID NO: 72511 - DNA, 110 bp, synthetic construct
  source 1..110: mol_type = other DNA
agcagctcagggaacggaccgttgtgctcaatggacagatggggaaagaggtccagacagagccagacctgctggaggtcatgccacgtggcagcagcagagtcaggact

SEQ ID NO: 72512 - DNA, 110 bp, synthetic construct
  source 1..110: mol_type = other DNA
actgaacacttgcttccctgtggcctccgtgcaggccccattttcccacccaaggggcaggcatccatgctgtcggggccaggacactccctaggatgtatcgggaccct

SEQ ID NO: 72513 - DNA, 110 bp, synthetic construct
  source 1..110: mol_type = other DNA
ggcaggcatccatgctgtcggggccaggacactccctaggatgtatcgggaccctcagcatcctccaggagctgtgcttgagacagtgatacgacagcaggagtgtttgg

SEQ ID NO: 72514 - DNA, 110 bp, synthetic construct
  source 1..110: mol_type = other DNA
ctcaaataatctgactcaatgttggcagtgtttcagtgcatacataatttaatcctcattatttcatcctgtcaaatttgacttagaattaaaggtttggttctataaga

SEQ ID NO: 72515 - DNA, 110 bp, synthetic construct
  source 1..110: mol_type = other DNA
aactttatgatatggtttaataccatgcaaggctagtctttgctcatgagttttcatttctgaaacttcttggcaattccacgtatccttttgaatgaacctcaggattg

SEQ ID NO: 72516 - DNA, 110 bp, synthetic construct
  source 1..110: mol_type = other DNA
atttctgaaacttcttggcaattccacgtatccttttgaatgaacctcaggattgtttttgtcaggttatgtccaaaatcgattgctgtctagtcaccccatgagttaat

SEQ ID NO: 72517 - DNA, 110 bp, synthetic construct
  source 1..110: mol_type = other DNA
actttcactgaaaagcctcggagttaaggttggacgtaaataaagctgtgtgtacacagagtgacaaaaaagctggggtacatccaaaagatgagggtcatcagattatc

SEQ ID NO: 72518 - DNA, 110 bp, synthetic construct
  source 1..110: mol_type = other DNA
cggtgtcatagtgcatggccctggcttcctaacatgggttctgttcctgtcaactggtccagcaggaagctggtgtcaagggttcttctctcaaaattggcatcatccaa

SEQ ID NO: 72519 - DNA, 110 bp, synthetic construct
  source 1..110: mol_type = other DNA
gagaattctaaattccttatgttagcagtctttatgcttttttttccccccatcattttactatgtatttactgactgcccattgctgcttggccctgggctcaacacta

SEQ ID NO: 72520 - DNA, 110 bp, synthetic construct
  source 1..110: mol_type = other DNA
ttttactatgtatttactgactgcccattgctgcttggccctgggctcaacactagagaagtacctaggattaaggctggtgacatctctggagcttgtattcttttgga

SEQ ID NO: 72521 - DNA, 110 bp, synthetic construct
  source 1..110: mol_type = other DNA
tctctctttctctccactggcttcccttcctcacagctccttcttcacagctctcaccccagcagaggcaagaatgaggctgatgggagaaactgttgtggggggccccc

SEQ ID NO: 72522 - DNA, 110 bp, synthetic construct
  source 1..110: mol_type = other DNA
accccagcagaggcaagaatgaggctgatgggagaaactgttgtggggggcccccctgccccatctgagcttgggttccatgtctgtcactggccagcttcagtgcacag

SEQ ID NO: 72523 - DNA, 110 bp, synthetic construct
  source 1..110: mol_type = other DNA
tgcttttataattccaaaaaatcattttgattgcaatagagtatcctctatgacgctacgtcactttaagaaaatgggcagccagtaaggaagctctgggccagctttcc

SEQ ID NO: 72524 - DNA, 110 bp, synthetic construct
  source 1..110: mol_type = other DNA
tgtgttgaccctgggatgtgggtcatccatggtgaagcagtgcagtagagagagcctggttccctggatgcctggccccctgagatcatagctgccctgaatcatctgcc

SEQ ID NO: 72525 - DNA, 110 bp, synthetic construct
  source 1..110: mol_type = other DNA
ggtccctcctgatgatagaattcttgtgctgtattgttctcatcactcatagatactttctggtctctttgttgtttgtcactttcccatctagactgtaagctgcacaa

SEQ ID NO: 72526 - DNA, 110 bp, synthetic construct
  source 1..110: mol_type = other DNA
ctttctggtctctttgttgtttgtcactttcccatctagactgtaagctgcacaagaagaggactgtgcttgccctgctccggacagtacctgcctggcatgttcccagg

SEQ ID NO: 72527 - DNA, 110 bp, synthetic construct
  source 1..110: mol_type = other DNA
tcttttatcatgtaaacaatatgcagtcatgtgtggtgggggcttaaaacgtgatattattgatttgttatttagtgaggttcacattttttaaaaatcaccgtttgggc

SEQ ID NO: 72528 - DNA, 110 bp, synthetic construct
  source 1..110: mol_type = other DNA
ttgatttgcagtccatgtaacaattacaccaaagtatctgcatccaccttagcacatcagccaagcatcaaaaaatgttataccaactctgtagaagaggaccaaggagc

SEQ ID NO: 72529 - DNA, 110 bp, synthetic construct
  source 1..110: mol_type = other DNA
gtatgtatccctagcttcaacagttaggagcgacataggaaagcataatagtgagagtgtccaaccccccttattactggtgttgggagaaagaatcagaatattaggtg

SEQ ID NO: 72530 - DNA, 110 bp, synthetic construct
  source 1..110: mol_type = other DNA
agtgtccaaccccccttattactggtgttgggagaaagaatcagaatattaggtggtctcaggggcatctggagtgcacacaggtctctaactgtggttattgcacctga

SEQ ID NO: 72531 - DNA, 110 bp, synthetic construct
  source 1..110: mol_type = other DNA
gggaccatgcagagccaggatttgggggcccagggggaaaaggagggtcaagattagtaggcaaagctgaggcagggttctggatgacatggagaatcctaattaatagc

SEQ ID NO: 72532 - DNA, 110 bp, synthetic construct
  source 1..110: mol_type = other DNA
gatagagggggtggtgaagtgagggaaagtgaaggacagcacattccaggcagagggaaagcttgtgttgtatccacaagccttggcctctttgaaaatcaccaggtgaa

SEQ ID NO: 72533 - DNA, 110 bp, synthetic construct
  source 1..110: mol_type = other DNA
ggaaagcttgtgttgtatccacaagccttggcctctttgaaaatcaccaggtgaatattttcaaggttatatcttcatattaattgaggagattgttttcaagttgtatg

SEQ ID NO: 72534 - DNA, 110 bp, synthetic construct
  source 1..110: mol_type = other DNA
ggaggggaaggcgagtcatggtaacgaaacaccttccatgacgggccaggcacgacagtacctcgttccatcctcgcaacagccaggtgagactggagttattgtctctg

SEQ ID NO: 72535 - DNA, 110 bp, synthetic construct
  source 1..110: mol_type = other DNA
aagatgtgtcctactcatcccttttcagcctcagcttccacctacacacgctgcagcaggcagttgcctggacctgcccaaagacacatctttccttctcccctcttgcc

SEQ ID NO: 72536 - DNA, 110 bp, synthetic construct
  source 1..110: mol_type = other DNA
gcaggcagttgcctggacctgcccaaagacacatctttccttctcccctcttgccttttcactgaatatttcctccacctggaatcttccctttgtgtctggcaacctcc

SEQ ID NO: 72537 - DNA, 110 bp, synthetic construct
  source 1..110: mol_type = other DNA
cagtttaccccattcagtgaagcgacagctctagcagcctgacttaaaacagtggtgcctgccctctccttcctggtccacccggcctcacttggtttccacaaggactg

SEQ ID NO: 72538 - DNA, 110 bp, synthetic construct
  source 1..110: mol_type = other DNA
tgcctgccctctccttcctggtccacccggcctcacttggtttccacaaggactgcccagcgaggctagcaatgaacttccagcctggaacatctcatgttggtgttact

SEQ ID NO: 72539 - DNA, 110 bp, synthetic construct
  source 1..110: mol_type = other DNA
ggggagtgggcaaggctgcctgctttggcaggggacagtcccagaaagaatcatagctgtgatccttcagtagccaaccctcctgccagctgagggactgagtgcctcgg

SEQ ID NO: 72540 - DNA, 110 bp, synthetic construct
  source 1..110: mol_type = other DNA
tttggcttattcttatccagccacagacaaccaaagaaaacaagctgtggaggaacgtctaaaatataccagggaatatatgcgattaaaccaagaagaaaacatgatcc

SEQ ID NO: 72541 - DNA, 110 bp, synthetic construct
  source 1..110: mol_type = other DNA
cgtctaaaatataccagggaatatatgcgattaaaccaagaagaaaacatgatcccggaggatacagagagacactgctacctcttaagcctagtcagtgtgagcaaaca

SEQ ID NO: 72542 - DNA, 110 bp, synthetic construct
  source 1..110: mol_type = other DNA
ggaaagccctagtaattgccaaatagagtcacctgccaattccctgaggctgagcacataatcaaatcacaaaggtttctctgtctcctgatagtaattctaaagacttc

SEQ ID NO: 72543 - DNA, 110 bp, synthetic construct
  source 1..110: mol_type = other DNA
ccactgttttctaacttgtatgtgttctgcagggtagacccattaaaacttccatttctggagcaatttgaggattaagagggaatcttaactacgggctgagacagaca

SEQ ID NO: 72544 - DNA, 110 bp, synthetic construct
  source 1..110: mol_type = other DNA
ttattaaagttatatattgtgcaacttctgtgtaacttggagggtcttctccaagtatttcctgtgtgctccttaggtcactcccagctcagcccccttcacttcttcct

SEQ ID NO: 72545 - DNA, 110 bp, synthetic construct
  source 1..110: mol_type = other DNA
tcagctctttctttaatggggatggcagggcgctaagacgatgagaacctagggagacactggtggaaggcattttagtccaaaaaaccaaacagctcatcctattgaaa

SEQ ID NO: 72546 - DNA, 110 bp, synthetic construct
  source 1..110: mol_type = other DNA
ccttcagataattcacccccagctagcagtagcaatgtgggagacctggaaaagaactgcctagtggacccaggtcaactgccagatccctgagagataaagtgttgtta

SEQ ID NO: 72547 - DNA, 110 bp, synthetic construct
  source 1..110: mol_type = other DNA
actgcctagtggacccaggtcaactgccagatccctgagagataaagtgttgttattttaagtcagtaaatttgggagtaatttgttactcacccatagcaactggaaca

SEQ ID NO: 72548 - DNA, 110 bp, synthetic construct
  source 1..110: mol_type = other DNA
cttttaaaaaagaactgagttctgtcccactatgcagcttttcctccctctgcgtagtgggctctcagtaagtggtgacagagtgacagggctcacaaattctggcagtg

SEQ ID NO: 72549 - DNA, 110 bp, synthetic construct
  source 1..110: mol_type = other DNA
gtccaggcatggcatgaagatacagattcctgaaggatgccctgagagcagccagtgtgcatggaaaaagcaaaaagaaacacgcatctttgttgaaatttgttctagag

SEQ ID NO: 72550 - DNA, 110 bp, synthetic construct
  source 1..110: mol_type = other DNA
tgtgcatggaaaaagcaaaaagaaacacgcatctttgttgaaatttgttctagagcaacacaacatccataactagggcattacagagacagataaatcgtgccgggggc

SEQ ID NO: 72551 - DNA, 110 bp, synthetic construct
  source 1..110: mol_type = other DNA
ttactgctgagccatgttgggaactcccgaaaatgctttttgaatgaataggagtcagcttggagccaaggctcagaggctgggtcttctcagtcccagtgctcctctga

SEQ ID NO: 72552 - DNA, 110 bp, synthetic construct
  source 1..110: mol_type = other DNA
taatcttctcagccactcccgagaagattcaaggtgagtaaaatgcaggctactgggcgggcaggatgcaggatgctacgagcaggatgcagacctggtccagtcatgca

SEQ ID NO: 72553 - DNA, 110 bp, synthetic construct
  source 1..110: mol_type = other DNA
ggcgggcaggatgcaggatgctacgagcaggatgcagacctggtccagtcatgcataggctgggatctctggagagcctcccacctttgcatgtaattggaaatatttag

SEQ ID NO: 72554 - DNA, 110 bp, synthetic construct
  source 1..110: mol_type = other DNA
cgggctgcgtggcgcacgtctcggggctccccgtcttacatcagccaggccactggaccctagttttgctcacggtgcctcccgtgttgactttcgttctcttggaattg

SEQ ID NO: 72555 - DNA, 110 bp, synthetic construct
  source 1..110: mol_type = other DNA
gaccctagttttgctcacggtgcctcccgtgttgactttcgttctcttggaattgctcccaaagaaatcgttagaaacctgttgtctaatttctgccgtagaacggagcc

SEQ ID NO: 72556 - DNA, 110 bp, synthetic construct
  source 1..110: mol_type = other DNA
gtaagcagtgtatgtgggtttagtcaccacctctgggcggccgtgaacagcctcgatcagtgtaccaggcagccagtgagccattttctgcctcctctataggaaggtgg

SEQ ID NO: 72557 - DNA, 110 bp, synthetic construct
  source 1..110: mol_type = other DNA
agttaagtgaattggaaatatcaatatgcacgcagactttcttttactttttctaaaaaatatcttccatctctgtctcctgtgaaattccagggccagcaacaacccag

SEQ ID NO: 72558 - DNA, 110 bp, synthetic construct
  source 1..110: mol_type = other DNA
aaaaatatcttccatctctgtctcctgtgaaattccagggccagcaacaacccagattatgggctgcaaaaaccatttccccctgaaagaaaccaagggcttctctgaga

SEQ ID NO: 72559 - DNA, 110 bp, synthetic construct
  source 1..110: mol_type = other DNA
cttgcgggcatgagagaactcggagtctctgtgactgcaccacacctgcagcacagccccagtgacacaagattgtgtaggggcgttggggacagtcaatatatctacag

SEQ ID NO: 72560 - DNA, 110 bp, synthetic construct
  source 1..110: mol_type = other DNA
tctttcttaccaaacaggaaaaagggtgattaagtacttggaaagtgcttcctttgttgcaggttatgtgctttgtgtgcattagagcaaccccacaagacaggtacaat

SEQ ID NO: 72561 - DNA, 110 bp, synthetic construct
  source 1..110: mol_type = other DNA
gcaggtgatggcgtcagaggccccagctgggcggggagcagcctcgcgtgtgccgattaagaactgagcttggaccagcatgatcccggggtgggttctggggtgtcagc

SEQ ID NO: 72562 - DNA, 110 bp, synthetic construct
  source 1..110: mol_type = other DNA
ttctatagacattaactaaaatgtagccaatggcagactccacagaggtaaagccctggaaagcttgtatcctctcttctgctggcagctggaagacctcagattctagg

SEQ ID NO: 72563 - DNA, 110 bp, synthetic construct
  source 1..110: mol_type = other DNA
ctggaaagcttgtatcctctcttctgctggcagctggaagacctcagattctaggacctcatctctatgttgagaggattagcgagggggtgtgttatccctccccagtc

SEQ ID NO: 72564 - DNA, 110 bp, synthetic construct; identical to SEQ ID NO: 72562
  source 1..110: mol_type = other DNA

SEQ ID NO: 72565 - DNA, 110 bp, synthetic construct; identical to SEQ ID NO: 72563
  source 1..110: mol_type = other DNA

SEQ ID NO: 72566 - DNA, 110 bp, synthetic construct
  source 1..110: mol_type = other DNA
aaaaataaagattaaatgcctcccctcttgggacatcaaggctggtcctcctttgatggtaagactcccttccagacgccaaggccacactgacccactgtgtatatgct

SEQ ID NO: 72567 - DNA, 110 bp, synthetic construct
  source 1..110: mol_type = other DNA
tagctttcatgctaacaaaaggccctccccactcccaacaacttaactgctgtccagcttacaaaatttacctctgctagttccaacacacacacacacacatttttttg

SEQ ID NO: 72568 - DNA, 110 bp, synthetic construct
  source 1..110: mol_type = other DNA
aacaaaacagtgtattatttccagatcatctcgagggtagaaggaaggcaggggacagggggtgatacggccaagcagtaaaattacagtgtttgggggaaagaggttta

SEQ ID NO: 72569 - DNA, 110 bp, synthetic construct
  source 1..110: mol_type = other DNA
ttgcggagggacgtggtgtgtgtttgaacacgtgctttcgaggctgagtgagtaactttgcttagcttggttagttggaggaggaaagtaagaaaagggcttccaggggc

SEQ ID NO: 72570 - DNA, 110 bp, synthetic construct
  source 1..110: mol_type = other DNA
aaagtcagagcatatacacaaacactgatccatagagcggaaaaggctgagtataaatttgaaggcttcgaggtcataaatcttgggtcaaccatattcagactagactt

SEQ ID NO: 72571 - DNA, 110 bp, synthetic construct
  source 1..110: mol_type = other DNA
gtaacactaactttgaaccagcatgggtgccctctttgaactatgacactagacgcgtcgcgttgcgtgagcaacgtccattacaagagggtaattatttcccttactct

SEQ ID NO: 72572 - DNA, 110 bp, synthetic construct
  source 1..110: mol_type = other DNA
gggctgcagagagagcctttgggaaacgggagggactgggaaagcaccgctctatgctaaggggctccccacgaatgcaaagcatggaatgaagcgaagatgcattcaca

SEQ ID NO: 72573 - DNA, 110 bp, synthetic construct
  source 1..110: mol_type = other DNA
gtgacagtttctcaatttggtataataatccactgattccattttctggaatattcaactttttttgcctccatgctgtaactaccgcatgttaatcatctttttcgtat

SEQ ID NO: 72574 - DNA, 110 bp, synthetic construct
  source 1..110: mol_type = other DNA
caactttttttgcctccatgctgtaactaccgcatgttaatcatctttttcgtatgggagctgtcttctgataagtgccttgtttgaagacacaatagctccctgaatta

SEQ ID NO: 72575 - DNA, 110 bp, synthetic construct
  source 1..110: mol_type = other DNA
gaagcatctttgctatttttaagtcaactttaacctgatttcagtgggaagccacctttacaggactttggtgtgagtgtccccccaagagcattcctgtttgttctgac

SEQ ID NO: 72576 - DNA, 110 bp, synthetic construct
  source 1..110: mol_type = other DNA
cacgcgctactctgccgcatctcctgtttggcacgtgacacctgtttcccttctggagctcctggaagcagaaccaccgaggcattcggatgacccccgtttctgagtca

SEQ ID NO: 72577 - DNA, 110 bp, synthetic construct
  source 1..110: mol_type = other DNA
ttacagaaaacatgagtttcttaatctacaaaactaagattcatacctaagccgtagctcagaacaacaacaacaacaaagtcctggcctgagcagtcagtagacttgct

SEQ ID NO: 72578 - DNA, 110 bp, synthetic construct
  source 1..110: mol_type = other DNA
aaggatttaggaaagcactgagtatcagccatccagccaaggtaggtacaggatggcattcaagcacagagtccccaggaagagctgcagtcctgatgccccatgctgac

SEQ ID NO: 72579 - DNA, 110 bp, synthetic construct
  source 1..110: mol_type = other DNA
ttataatgatttttattttttccattaaagtatagccacttcttctctgcttaagacttgctgacttgtagcatctggaagacctctgggaaggctcttaggggatcctc

SEQ ID NO: 72580 - DNA, 110 bp, synthetic construct
  source 1..110: mol_type = other DNA
acttgctgacttgtagcatctggaagacctctgggaaggctcttaggggatcctcatgagaaattcctaaggggcttgacaagtcttgtaaggcatgtgtgggtacaaat

SEQ ID NO: 72581 - DNA, 110 bp, synthetic construct
  source 1..110: mol_type = other DNA
gcagagacgctgggcgaaggaggaaagctgctctccttgcgccgcactggcgcatgcgccgtcagactgcacgctggatgttgagagaaagcccgctaattcctcgctga

SEQ ID NO: 72582 - DNA, 110 bp, synthetic construct
  source 1..110: mol_type = other DNA
acaaggaacaggaataaatacaggtagccacgttacagaaggtgacacatgaaggagagttatgtgagaaggatctgacaaacggatactcaaagcagaccaaactaagg

SEQ ID NO: 72583 - DNA, 110 bp, synthetic construct
  source 1..110: mol_type = other DNA
agagttatgtgagaaggatctgacaaacggatactcaaagcagaccaaactaagggcagattggcaaaggtaggtataaagcaaatccagaggtaggagctaagatgcaa

SEQ ID NO: 72584 - DNA, 110 bp, synthetic construct
  source 1..110: mol_type = other DNA
gttccaacctcggccccccgggggacgtccatatccagcaggtgtggccataaaatcaacagcttcttaactaatactggtgtcttcagtatcctcccttccactcacac

SEQ ID NO: 72585 - DNA, 110 bp, synthetic construct
  source 1..110: mol_type = other DNA
ttcctatgacatatttatcccatacgaaagatttgctaaaggagttgtaatggccttcggggacaggaagaataaggtttcggtagaaaatgtgaaattaattttgctgg

SEQ ID NO: 72586 - DNA, 110 bp, synthetic construct
  source 1..110: mol_type = other DNA
ggaataccaactaatgtctcccagaagagtgctccacaggaaagtctgaaaagggccgggcgaactgtccaacctacacaggagcaaggatcctgctgacatccagaagt

SEQ ID NO: 72587 - DNA, 110 bp, synthetic construct
  source 1..110: mol_type = other DNA
aaaaaaagcatatgatctcgatgaaaaaatctgccaaacttagctgagggccttgctctaagaggtgactgatgccgtgttcctggttgagaagattcaactgtggttaa

SEQ ID NO: 72588 - DNA, 110 bp, synthetic construct
  source 1..110: mol_type = other DNA
ccctcgttgctgcttcacctctggcttcagcagaggtttctttccgtgggggcgttgtctctggtctcctcgaaccaggttaggtgaccttccactcgtgtccttatcac

SEQ ID NO: 72589 - DNA, 110 bp, synthetic construct
  source 1..110: mol_type = other DNA
attcaagctggaactctgagaaaggaaaggacaaggggaagcatagagtgatgctgactgagtctttggagacatcttacaatgaaggtcagcaaacttttctgtaaggg

SEQ ID NO: 72590 - DNA, 110 bp, synthetic construct
  source 1..110: mol_type = other DNA
gactgagtctttggagacatcttacaatgaaggtcagcaaacttttctgtaagggttcattgtacgtattttcagctttgtagggcacatggcctctgccaagacgcttt

SEQ ID NO: 72591 - DNA, 110 bp, synthetic construct
  source 1..110: mol_type = other DNA
gtaacacccagaccagaggtgactacagatgatttatttcaaaatctgatttacagtgatggttgtataactcactaaatttactaaaacccattaaatggtcacccttg

SEQ ID NO: 72592 - DNA, 110 bp, synthetic construct
  source 1..110: mol_type = other DNA
aaaaaattttaagttaaaacaagctgtgcccagaggaacatatagtctggctcctcaatgtcacaagaaaaatatgggaaagctgagcttagagctaaaaagaactactg

SEQ ID NO: 72593 - DNA, 110 bp, synthetic construct
  source 1..110: mol_type = other DNA
aaccagccagatgcaaccgaaattgtgttttcatccctgagtttccaactgttctatttaagcaaattttctctattaaaatttgactttaaaattttagagacacattt

SEQ ID NO: 72594 - DNA, 110 bp, synthetic construct
  source 1..110: mol_type = other DNA
gtggatatatttacatgtgggactgagtcactcggctgcacacctgaagctaacgcaacattatatatacatcaactatactcaaataaaactaatttaaaaaagaaaat

SEQ ID NO: 72595 - DNA, 110 bp, synthetic construct
  source 1..110: mol_type = other DNA
agttcaggcaactgtctcccagggttttgctaagacactgggcgaacctacaggtcccaagtctaatggaataggctgtctcaaagtttcccacctctagatttatacag

SEQ ID NO: 72596 - DNA, 110 bp, synthetic construct
  source 1..110: mol_type = other DNA
actaaaatgccgagggagggaagcgaactgagccgagctatcaaagtgctgaacgccttttcgtcaaagcaggaggcaaagaggaaatgtctgaagttgattaatgagat

SEQ ID NO: 72597 - DNA, 110 bp, synthetic construct
  source 1..110: mol_type = other DNA
gcacagggagatccttagttagtagagctactgaaggattttaaacagggtacgaccgagtcagatttgtacaatccggagcttattctagagccaatggaaggtagtgc

SEQ ID NO: 72598 - DNA, 110 bp, synthetic construct
  source 1..110: mol_type = other DNA
actgtcaagtaagtggtgatagaagatcttagattgtgtcatatggttaaatgttattgctgtacatattccagcaatcatatagacctcctaaaattctggaatatcct

SEQ ID NO: 72599 - DNA, 110 bp, synthetic construct
  source 1..110: mol_type = other DNA
attgctgtacatattccagcaatcatatagacctcctaaaattctggaatatcctggtaaatgatgtcagacacagcttcagtaattatcttaaattgttgtatgtcacc

SEQ ID NO: 72600 - DNA, 110 bp, synthetic construct
  source 1..110: mol_type = other DNA
agtcttctacacagaagttgttctccactctgcgtggacctctagtccctctccaggacacctgggcagcggggccaggctcagggaggacacacccagaacgacgagcg

SEQ ID NO: 72601 - DNA, 110 bp, synthetic construct
  source 1..110: mol_type = other DNA
tgtattcttctctgtgtgatgacaaggtcatcagtattgttgacaaggtcaccgcggcgtccagcacatccccggaacttaccatcttgtaaatggagtttagacctttg

SEQ ID NO: 72602 - DNA, 110 bp, synthetic construct
  source 1..110: mol_type = other DNA
gaacccctgattgatctggtcttttggctgctagggagagtctgatttccgtgtagagcaggatgtacccctgaagctgaaggtagctcgatattttttgtgagagaaag

SEQ ID NO: 72603 - DNA, 110 bp, synthetic construct
  source 1..110: mol_type = other DNA
ttcgaagcttttcctttttaaacgcgggtttcaaggccgactcctgccgtctccgtgtctccgtttactcccgcgaagagggttctcatgaagccaccgtgggcggtgcg

SEQ ID NO: 72604 - DNA, 110 bp, synthetic construct
  source 1..110: mol_type = other DNA
cccatttgggttccttaaattccccccattgacttggtgataaaaatgttctctctattataatcatcagggctggcaactgggacacggttttttatggttctcttttc

SEQ ID NO: 72605 - DNA, 110 bp, synthetic construct
  source 1..110: mol_type = other DNA
ctccacttgtaaaaacaagcaaacgagctgaagcttgggtggaaaaaagttagcgtctaggtggctgaacaaagatgtcttttgtactattttccatgtaaaaattattg

SEQ ID NO: 72606 - DNA, 110 bp, synthetic construct
  source 1..110: mol_type = other DNA
ttgaaagattaaaaaatatttcaattggactccaacagtaggaggactctatccgaaaatgcgattctacataaggctgttaagcacccccttgaaaagcacctggatgc

SEQ ID NO: 72607 - DNA, 110 bp, synthetic construct
  source 1..110: mol_type = other DNA
gcatttgagaggaggacataggctgctccctctgtggggtataggtcatcctactccagatacactagaccatctgaaatctcactggaaaaaaaccatcattacgtttt

SEQ ID NO: 72608 - DNA, 110 bp, synthetic construct
  source 1..110: mol_type = other DNA
gtgaccagcattaatgatctccacaaaggcatcactctgcctctcggtccgttgctgcgtgtcttactttcttgccatttccatcttcctgagtgtagcttccttaggcc

SEQ ID NO: 72609 - DNA, 110 bp, synthetic construct
  source 1..110: mol_type = other DNA
tcactttttggtgagacaataagaccatcagttctccatcaattattttgtaacgtccttatttatgtgtctactactaaaccatgagctctttgtaactcctgttggaa

SEQ ID NO: 72610 - DNA, 110 bp, synthetic construct
  source 1..110: mol_type = other DNA
acctgagggcttcagctgcagcatgttctcttctctgttctgagtggctgacagaagagcgtctgccatgttgttatttacacattgtatcctaaatacatatgttaaat

SEQ ID NO: 72611 - DNA, 110 bp, synthetic construct
  source 1..110: mol_type = other DNA
atttatactcagtccatgtcgcttcgcattcacttccggggtgaaacaaacaaaaacgaaaggctaccactgtagggcaggcaacaagcaactgtcgaccaaacctgcgt

SEQ ID NO: 72612 - DNA, 110 bp, synthetic construct
  source 1..110: mol_type = other DNA
acgaaaggctaccactgtagggcaggcaacaagcaactgtcgaccaaacctgcgtgcacacacactcacacacacacacacacacacacacacacacacgttcctctctt

SEQ ID NO: 72613 - DNA, 110 bp, synthetic construct
  source 1..110: mol_type = other DNA
atagaatatttacagaaggatctataagaaattatttgtgaggaaggaaatgagggggcaccttacctttcactctacacttcctgtgttgttgaaactctttgtcatac

SEQ ID NO: 72614 - DNA, 110 bp, synthetic construct
  source 1..110: mol_type = other DNA
gggcaccttacctttcactctacacttcctgtgttgttgaaactctttgtcatacgcaccatcactgctataatttgtttaataaaaaatgtttaaagacttgtaggatt

SEQ ID NO: 72615 - DNA, 110 bp, synthetic construct
  source 1..110: mol_type = other DNA
aaggtaacactggtgaccggagctgttcttaggagtcccttggacaggtgtccggatggaatgagttaaggcgccgcccttttgtataaaagtttgctcgagaccctaga

SEQ ID NO: 72616 - DNA, 110 bp, synthetic construct
  source 1..110: mol_type = other DNA
caggccaggcagtggcccttaggctcagatgcaaagggccggccagctgcggtgctgtggatgcagagtcctttctccatcgcacacttgtttaattgccgcaggatcct

SEQ ID NO: 72617 - DNA, 110 bp, synthetic construct
  source 1..110: mol_type = other DNA
gcacctgccaaaccggaaaggtgattccgggagttagcaaaaaaaagtgtgtggggggggctattcaggttttcagctttacagtatctttgggcaacttttatgttttt

SEQ ID NO: 72618 - DNA, 110 bp, synthetic construct
  source 1..110: mol_type = other DNA
agccgtctgcgactgctcttctgttgctcagaagtgaaaaccaccagagtgatatcccttttgcatgttgacagtctgatttcggtacgcgagaggggtattcagaatac

SEQ ID NO: 72619 - DNA, 110 bp, synthetic construct
  source 1..110: mol_type = other DNA
ttggctgcatagagaactggaaagctgtaaaaagtattaaaagtacagttgtgcgtttattactcttgggaaaatatatccaaaatagaatgcctaattcctgtctttac

SEQ ID NO: 72620 - DNA, 110 bp, synthetic construct
  source 1..110: mol_type = other DNA
ttctgctgcgtcttcattttcagttgttcccctgctttactttgcgtcgagtcaggtgcttgctcgaatccacaaacctgcgcgttcgggcgcccctttctgttcttgga

SEQ ID NO: 72621 - DNA, 110 bp, synthetic construct
  source 1..110: mol_type = other DNA
gtgcttgctcgaatccacaaacctgcgcgttcgggcgcccctttctgttcttggaggcttagccgcttggtgtttctccttcatagcctcactgtgcagagacctccgca

SEQ ID NO: 72622 - DNA, 110 bp, synthetic construct
  source 1..110: mol_type = other DNA
ggggacgtgcagtgtgcgggattccgagacttaggatgaaaattaaaaaagcagacgatctcattaatatcttcttatgctgttacacgttgagatggtcatgttttggt

SEQ ID NO: 72623 - DNA, 110 bp, synthetic construct
  source 1..110: mol_type = other DNA
gcgggattccgagacttaggatgaaaattaaaaaagcagacgatctcattaatatcttcttatgctgttacacgttgagatggtcatgttttggttatgttacattaaat

SEQ ID NO: 72624 - DNA, 110 bp, synthetic construct
  source 1..110: mol_type = other DNA
gagcactggggaccttagatggatgtctagctgtgtgggtccatcttaaacattcggggtgagtgggaaattaagaatttgggaggtctttaacagtaccatttctgtaa

SEQ ID NO: 72625 - DNA, 110 bp, synthetic construct
  source 1..110: mol_type = other DNA
agaggtccccggttcaagtccgggtgcccccttaacccttttataagcctaaagcgctctagggtttagagttcctctctcaagagagagaaagggtgggtctgcagagt

SEQ ID NO: 72626 - DNA, 110 bp, synthetic construct
  source 1..110: mol_type = other DNA
gctctagggtttagagttcctctctcaagagagagaaagggtgggtctgcagagtaaggggtggggggcggaagttgagaaatgggagattgcaaaggagcacagcgagg

SEQ ID NO: 72627 - DNA, 110 bp, synthetic construct
  source 1..110: mol_type = other DNA
tactgtacagtaaatccttgttgcttatctcttttatgtattgtagtgtgtattggtatatcccatattcctaattcatccctctccttccctcctttttccctttagta

SEQ ID NO: 72628 - DNA, 110 bp, synthetic construct
  source 1..110: mol_type = other DNA
tgcacagatgtgccaactgaagggatatataccttcaggtgtaggtcctgcacatgtctccaaagagcttgggcaggatctcttcaaggtgctgtttcgtaatgaagaac

SEQ ID NO: 72629 - DNA, 110 bp, synthetic construct
  source 1..110: mol_type = other DNA
gtgagagttgtgggttaagtgttatttggggccaaatgaggattagcgcctgggaaattgctctgaggaggtgagaggggagccaggatatgtaggagtttagcaacata

SEQ ID NO: 72630 - DNA, 110 bp, synthetic construct
  source 1..110: mol_type = other DNA
tctaatgacctgcatgacagcaatataaattttcattaattatcagttattcccactgcgatggaagctccaccaagggagcacctgcatctgttttcttctatgtgcct

SEQ ID NO: 72631 - DNA, 110 bp, synthetic construct
  source 1..110: mol_type = other DNA
ctgcgatggaagctccaccaagggagcacctgcatctgttttcttctatgtgcctgcctggcgcttcgtgagctctcagaaatatgtgttgaataaatggatgaataaac

SEQ ID NO: 72632 - DNA, 110 bp, synthetic construct
  source 1..110: mol_type = other DNA
tgtagaagcttccagcccagctccctctgttgccccagaactcagcagcatccatggggaaagccatgtgcagggttccttttgtgacactataggtctagccccacgaa

SEQ ID NO: 72633 - DNA, 110 bp, synthetic construct
  source 1..110: mol_type = other DNA
ggaggttggggaaataggtttaaaaggtttctgggggtgggggcagtggcagaaggctttaagttaaaaccccaaacatttactgagtgctggctgggcaacagatgcca

SEQ ID NO: 72634 - DNA, 110 bp, synthetic construct
  source 1..110: mol_type = other DNA
tggaagaggtttggagaatggggggcatctgcaatgtagtgagcactggagaacggaggggagagtgaccacagcattcaggcacagttgtgtgtcctggggggtgacgg

SEQ ID NO: 72635 - DNA, 110 bp, synthetic construct
  source 1..110: mol_type = other DNA
agaaggtgaggtgcccagggccagagaccagagcagggtggggtggcaggagttgagaggcacaggctgtggctgacatatgaccacatgtgtatgtgtgaagatggccg

SEQ ID NO: 72636 - DNA, 110 bp, synthetic construct
  source 1..110: mol_type = other DNA
gatcaggagaaagactcagaatgcagcacaaaggggagcaaggtgggacaaagagaagcgtggccaagggctgtgggcagagtgtgagatgttctcagagatgtttaacc

SEQ ID NO: 72637 - DNA, 110 bp, synthetic construct
  source 1..110: mol_type = other DNA
aagcgtggccaagggctgtgggcagagtgtgagatgttctcagagatgtttaacccgaggtccacagaggaccggaggtgggtggagcattcactgtctgaaggcatcat

SEQ ID NO: 72638 - DNA, 110 bp, synthetic construct
  source 1..110: mol_type = other DNA
cttgtagaccttggcttatactcgctgaaaaaagatagttgttgagcttgcctggagccccagaatcacaggtttgcgggttctcctgtgcactcactgaccctcagagc

SEQ ID NO: 72639 - DNA, 110 bp, synthetic construct
  source 1..110: mol_type = other DNA
tgcaatgtgcatgggtgtcctggggaatccaggaactcagtctgggccagggaatgagtgcagctccctgctgaggccagctctgctccaggctcctggggaagagaaag

SEQ ID NO: 72640 - DNA, 110 bp, synthetic construct
  source 1..110: mol_type = other DNA
tgggcttagcacgaatgactccatctggggcctgctgtttctctttagcaatcccccttttgctcacccttagcttaactggaagacgcaaccaaaatttaagactttag

SEQ ID NO: 72641 - DNA, 110 bp, synthetic construct
  source 1..110: mol_type = other DNA
ccttttgctcacccttagcttaactggaagacgcaaccaaaatttaagactttagcgccactcctagctcctgctctgaagttcttgctgtgacccaagccgctgcagtg

SEQ ID NO: 72642 - DNA, 110 bp, synthetic construct
  source 1..110: mol_type = other DNA
cctatgtgtctaacacctaaggcctgactatattccattagtaacggtgagctgcatttatcaaaggttatttgactctcatagaactagaaaccatagcactggcactc

SEQ ID NO: 72643 - DNA, 110 bp, synthetic construct
  source 1..110: mol_type = other DNA
gtgctctcgcacctggtgcgccagctgactatccatcttcacccctgcaggctttgtggccccaggccacctacttaacttctctgtgctccagccagagcctgaatttg

SEQ ID NO: 72644 - DNA, 110 bp, synthetic construct
  source 1..110: mol_type = other DNA
aatctgggggacccatatgggggaaactagaaaacagctaaagaacatgaaaacgagacttgactaggaggtcctgtcctggctctgtggtaacaaacccaactagtatc

SEQ ID NO: 72645 - DNA, 110 bp, synthetic construct
  source 1..110: mol_type = other DNA
ttaataattaacttaaaagacgaaattgaaaaccgaggccagattgaggtttcgtttacctcactgggctggaaagaacaaagctcaagtgatgtcagagattctttggg

SEQ ID NO: 72646 - DNA, 110 bp, synthetic construct
  source 1..110: mol_type = other DNA
cttgttccgcaagtcccccgccctgcgttgttttctgagtggctgctggaggttacactcggctccgatgcagaacagcgttggcagattgtgaagcccagggagaggcc

SEQ ID NO: 72647 - DNA, 110 bp, synthetic construct
  source 1..110: mol_type = other DNA
gtcccaaaaggcgagtctgtgcgacggactcagaagaactttctgaagtaggcgctctgacgtgcagggccggtggcagtgtgcacatggcgacaccattgtcagggtca

SEQ ID NO: 72648 - DNA, 110 bp, synthetic construct
  source 1..110: mol_type = other DNA
gctgggcagatgccacaagggttccagagaaaacctgaaaagcccaccaaaatccagacctgccagaccctggcctgtgacgaagccctgagggcaagggagggggtggc

SEQ ID NO: 72649 - DNA, 110 bp, synthetic construct
  source 1..110: mol_type = other DNA
gggggcggcaggcgaggcggccctgtgggaattccttggaggttttcagcgccggagtgctctggtctaagttacttttgcctttaatgaactcgttctggtttctgtgt

SEQ ID NO: 72650 - DNA, 110 bp, synthetic construct
  source 1..110: mol_type = other DNA
ttggtggacagtgttgggaagagccagctgcacacacatctcatctgtccatccgaacatccgtccgtgtatacatccttctactgtctgtctaccgtcccgtcgatctg

SEQ ID NO: 72651 - DNA, 110 bp, synthetic construct
  source 1..110: mol_type = other DNA
caggaacaatgagtttcaaatgagccaagggagaggaatgtgtgccctgacccgacccgtgggaaggggacagctccatccctggcgctagggatcaacagggagggtct

SEQ ID NO: 72652 - DNA, 110 bp, synthetic construct
  source 1..110: mol_type = other DNA
cccgtgggaaggggacagctccatccctggcgctagggatcaacagggagggtctttgcttctttgctttttgagcccccgcgcccttcgcaggaggcaagagccttgtc

SEQ ID NO: 72653 - DNA, 110 bp, synthetic construct
  source 1..110: mol_type = other DNA
gctaaggggtggcttcagccagaggaggcagtgggaacgtgggacgtggaccaagtccgcggcagtgggggacgccagccctgtagggatggatctgaagatgctccttc

SEQ ID NO: 72654 - DNA, 110 bp, synthetic construct
  source 1..110: mol_type = other DNA
tccgcggcagtgggggacgccagccctgtagggatggatctgaagatgctccttctgagcgtctggcacattcctctgctgcagcaggcgctggctggggcgctgatgga

SEQ ID NO: 72655 - DNA, 110 bp, synthetic construct
  source 1..110: mol_type = other DNA
cctcacgccggccctccctcggcagacaaggacgtgggctcctgcccccagtcacagatctttcggtacaacctgaccacctgccagcagacctgccgctcgctgtccga

SEQ ID NO: 72656 - DNA, 110 bp, synthetic construct
  source 1..110: mol_type = other DNA
tgcttctcccacatccagcccccgtgggtgtcagcgtcttcctccccaggcccacccgggggctgcctccagctctggggggtgcataccttgttcaggacgtccttctg

SEQ ID NO: 72657 - DNA, 110 bp, synthetic construct
  source 1..110: mol_type = other DNA
ccgggggctgcctccagctctggggggtgcataccttgttcaggacgtccttctgagagcccaggtagaggtggggcaggatgcgggtcaggcccacgctgggcgcgggc

SEQ ID NO: 72658 - DNA, 110 bp, synthetic construct
  source 1..110: mol_type = other DNA
taggatgcttacctaaggctttccagagggcgccttgaaaggctagacgtgcttttctccaacggccaccaaacttggtgtctcccagcttttgctgcacagcattttgg

SEQ ID NO: 72659 - DNA, 110 bp, synthetic construct
  source 1..110: mol_type = other DNA
tctccaacggccaccaaacttggtgtctcccagcttttgctgcacagcattttggcttaacattcagtcccttaaatatgtagcttctctgccttatcacttcttgtcgg

SEQ ID NO: 72660 - DNA, 110 bp, synthetic construct
  source 1..110: mol_type = other DNA
tcgaaggtactatgaacacctgttctcagaactcagagtcatgcagactagaccacgtgcgcccccacagctggcaatcctgagggttggtgacacccatggacaggagc

SEQ ID NO: 72661 - DNA, 110 bp, synthetic construct
  source 1..110: mol_type = other DNA
cgtgcgcccccacagctggcaatcctgagggttggtgacacccatggacaggagccaatgtgtggttagactgtgccgcgggaggggcactgggtgccgccgaggagtgt

SEQ ID NO: 72662 - DNA, 110 bp, synthetic construct
  source 1..110: mol_type = other DNA
ggctccggccaccgcgcaccctcagaggccaccgggcctctgtgccggatccgcagcctgagtgtggggggagggcaagagcttcctcttccctcttcatctgtcaccta

SEQ ID NO: 72663 - DNA, 110 bp, synthetic construct
  source 1..110: mol_type = other DNA
gcctgagtgtggggggagggcaagagcttcctcttccctcttcatctgtcacctaaggaacgtgccctgagcctctatgtcccccctaaagaccagagcctgcggggaca

SEQ ID NO: 72664 - DNA, 110 bp, synthetic construct
  source 1..110: mol_type = other DNA
gctgggccggcctgaggggaaaggaaggggctctgaagacgtgtggggggtggtctgcagggccaggaaggacccgggtttactcacatccactcataaacggatgtggc

SEQ ID NO: 72665 - DNA, 110 bp, synthetic construct
  source 1..110: mol_type = other DNA
tgcagggccaggaaggacccgggtttactcacatccactcataaacggatgtggccctaccagcccccacggcccccacctggctgcgtcatagctgaggtgggcttgga

SEQ ID NO: 72666 - DNA, 110 bp, synthetic construct
  source 1..110: mol_type = other DNA
ctttggccacgtgcagtttgcggtcaacttccttctcctcctggtcctctggaggcagcccataccccggaagacagacaaagccccatgaccgcagcccccaggcaccg

SEQ ID NO: 72667 - DNA, 110 bp, synthetic construct
  source 1..110: mol_type = other DNA
cagcccataccccggaagacagacaaagccccatgaccgcagcccccaggcaccgactggcaataaactccatcagaaccacttccagcctggcctctgcaggctcccac

SEQ ID NO: 72668 - DNA, 110 bp, synthetic construct
  source 1..110: mol_type = other DNA
cacgacgggaactcctaaacgcattttcttttaaagctcaaaggcaggcttttttaacccaggaaagttctttgctccggtgtttttaaggaaataaatacctgtgtcgc

SEQ ID NO: 72669 - DNA, 110 bp, synthetic construct; identical to SEQ ID NO: 72668
  source 1..110: mol_type = other DNA

SEQ ID NO: 72670 - DNA, 110 bp, synthetic construct
  source 1..110: mol_type = other DNA
gagtggatttcatcaaaaggtgaacattcccgcaaagtatgctgcggggaggacgaaaagacacaggctgggacaaccgtcttggaaaagcacacgtgggggaaagatgt

SEQ ID NO: 72671 - DNA, 110 bp, synthetic construct
  source 1..110: mol_type = other DNA
ctcctggactgccccctctgccccaacgacccacacatccagcactgctaagcgtgaatatccggccctgccaagggtctgggggtctgcctgcaggagcctaggcctgt

SEQ ID NO: 72672 - DNA, 110 bp, synthetic construct
  source 1..110: mol_type = other DNA
tttctggccacgcgccccgcagaccacgggccctggagcagggttttgctttacggctgagaaacagcttctgggtctggaaggcgtcttttgggtgagtaacctcgtga

SEQ ID NO: 72673 - DNA, 110 bp, synthetic construct
  source 1..110: mol_type = other DNA
ccgccccacagctgtgcggccgtgagcaggtggctccctctcctggcctcggcatccctgtggaagaatgtgggggattataatttttctgctgatgtgagaaggttcct

SEQ ID NO: 72674 - DNA, 110 bp, synthetic construct
  source 1..110: mol_type = other DNA
ccctgtggaagaatgtgggggattataatttttctgctgatgtgagaaggttcctcatgccgatttcctgggagagctccagggtcaagccttggattggctaagctttg

SEQ ID NO: 72675 - DNA, 110 bp, synthetic construct
  source 1..110: mol_type = other DNA
aaaacctttctttgcttccaggacgtgcaggtgacactgtttcctccctgaccttggatttgagagccaggtccctgggaactgtggtctggtgagtggccaccaggggt

SEQ ID NO: 72676 - DNA, 110 bp, synthetic construct
  source 1..110: mol_type = other DNA
ttcgatccctggccgggttaaggatccagcatggcagcacctgcagcataggctgtaaccgtggctcagatctgatcgctggcctgggaatgccttatgtctcagcagcc

SEQ ID NO: 72677 - DNA, 110 bp, synthetic construct
  source 1..110: mol_type = other DNA
agcacctgcagcataggctgtaaccgtggctcagatctgatcgctggcctgggaatgccttatgtctcagcagccaaaaaagaaaaaaacagaagaaaaaaaaaaaaaga

SEQ ID NO: 72678 - DNA, 110 bp, synthetic construct
  source 1..110: mol_type = other DNA
agtggtcagagggaacttggccccaggaaggacaccccagttctctcactcgcacaatgtgcttaagacagaacaactcgtgtttctgggtcgtgatgctccttcctgtc

SEQ ID NO: 72679 - DNA, 110 bp, synthetic construct
  source 1..110: mol_type = other DNA
ggatatgctcgcacacgctcggggctgtttctggacacagcggggctccacggggaccctgctctccactctgtttctcggtctctctcccaacctctgtctccaggtgt

SEQ ID NO: 72680 - DNA, 110 bp, synthetic construct
  source 1..110: mol_type = other DNA
atggagtaggggtgcttgttgacagaacaagtgaatcagaaatgttcacttcccaggtttggagaagacctctctttggagacctggttgtaccgttaggttttggggtg

SEQ ID NO: 72681 - DNA, 110 bp, synthetic construct
  source 1..110: mol_type = other DNA
ggtttggagaagacctctctttggagacctggttgtaccgttaggttttggggtgtcaggaaggtgcagtgattcacgtgacctccggagatggattccagacagttcag

SEQ ID NO: 72682 - DNA, 110 bp, synthetic construct
  source 1..110: mol_type = other DNA
cagcatcaacagctgagcctttccgcgtcttccagttctagctccttcttgctcaacaattcttcctcccatccagctctctgtttgctttttaccataagcaaccgaga

SEQ ID NO: 72683 - DNA, 110 bp, synthetic construct
  source 1..110: mol_type = other DNA
gagtaatgactctgctgctgggtaaatgttacaggcaggcttttattgggatgagatgtgggcgtcaggccggctctggagcccgggaggaatgagtccagacctgcagt

SEQ ID NO: 72684 - DNA, 110 bp, synthetic construct
  source 1..110: mol_type = other DNA
agccactgtgctggcctggggctcaaacctgcatcctggcaggttgcactacagtgggaacccccaaattaaattaatttcaatgacgatatcaacagatatttattgca

SEQ ID NO: 72685 - DNA, 110 bp, synthetic construct
  source 1..110: mol_type = other DNA
ctggcaggttgcactacagtgggaacccccaaattaaattaatttcaatgacgatatcaacagatatttattgcattgatctcactgcaagcacttatttttaaataaat

SEQ ID NO: 72686 - DNA, 110 bp, synthetic construct
  source 1..110: mol_type = other DNA
ctgtgagaagcactgcaggtgtctggaatagatctgctgcttccttggtgccttgcatcctgttccaccccaggctggccctcctgtccccaccctgcccttcgtgcagc

SEQ ID NO: 72687 - DNA, 110 bp, synthetic construct
  source 1..110: mol_type = other DNA
ctgcttcctcctccagactgtgcagtaatgcggccaacgtcacctgggttttacgagtttctgggggcagctggagccccatccgagtccctctggtagtccagctgcat

SEQ ID NO: 72688 - DNA, 110 bp, synthetic construct
  source 1..110: mol_type = other DNA
ccactctcagtctctacagatttgcccatctggacgttttgtataagtggaagcctgcggtgtgtggtcttggcgcgccatggaccggcttgctttagcgtagtgtgttc

SEQ ID NO: 72689 - DNA, 110 bp, synthetic construct
  source 1..110: mol_type = other DNA
tgcggtgtgtggtcttggcgcgccatggaccggcttgctttagcgtagtgtgttcaaggttcatccttatcgtagccggtgggagaatttctttttcaggctgcataatg

SEQ ID NO: 72690 - DNA, 110 bp, synthetic construct
  source 1..110: mol_type = other DNA
gtggtggtggtggtggcatgatggcggtggtggtggcgtgatgacactgatggtgggagtgatgctgatgctgtgacgatgacgacgacaatgactgtggtggtgactgt

SEQ ID NO: 72691 - DNA, 110 bp, synthetic construct
  source 1..110: mol_type = other DNA
ggagtgatgctgatgctgtgacgatgacgacgacaatgactgtggtggtgactgtgtcctgggacccctctcctgccccttggggccgtctctcaaaacagaagcacgac

SEQ ID NO: 72692 - DNA, 110 bp, synthetic construct
  source 1..110: mol_type = other DNA
cctccttgcgttccccacccacagcgtgtgacacaccacttccggttctggccattttgatgtggaacagcatcttcgcagtccccccaccccccgccaccccacggggg

SEQ ID NO: 72693 - DNA, 110 bp, synthetic construct
  source 1..110: mol_type = other DNA
tttgatgtggaacagcatcttcgcagtccccccaccccccgccaccccacgggggagctgtccgggcagctcagatgttgccaggaagtctgtgataccttctccagaat

SEQ ID NO: 72694 - DNA, 110 bp, synthetic construct
  source 1..110: mol_type = other DNA
gtgtccgactttcttcccagtgaggatgcttcctcctccacccattcctgctcggtttccggcatcggccgccacagctaacacagctctaagcaggtgctgacgccttg

SEQ ID NO: 72695 - DNA, 110 bp, synthetic construct
  source 1..110: mol_type = other DNA
ccggcaggtaagaacaaaatgctcttttttaaagtagcagaacaagagctctcgaaattacaattattacagcagacatgaacactctgatagatggaaagacagactga

SEQ ID NO: 72696 - DNA, 110 bp, synthetic construct
  source 1..110: mol_type = other DNA
tcctgaaagcagtctgccagatgaaagacgccagctgcaaaaggcctacagtacacggtcccacttatgtcaatggccggaactgccagcctagggacaaacaggaggct

SEQ ID NO: 72697 - DNA, 110 bp, synthetic construct
  source 1..110: mol_type = other DNA
agcagagatcaacccacgtgcacacactcagccatgatcacagcacttcaactcgaacctcacagctccacagaaccctgcccgccagccagccagccagccagacacac

SEQ ID NO: 72698 - DNA, 110 bp, synthetic construct
  source 1..110: mol_type = other DNA
ctctgtcaaacatctgtggcagctgtagtgccagtgagcccaggccaagccggctctcgaggcagggagctgagtaccttatcatgctgcgcttcttccagctgcttttt

SEQ ID NO: 72699 - DNA, 110 bp, synthetic construct
  source 1..110: mol_type = other DNA
cacaatttacacagacgtgcacggagaccgccctgtggagacgggctggtcctgagaagaggagtcagctgaagaaggtgaacgactctggacgtgagcattcagtgcag

SEQ ID NO: 72700 - DNA, 110 bp, synthetic construct
  source 1..110: mol_type = other DNA
gaagaggagtcagctgaagaaggtgaacgactctggacgtgagcattcagtgcagacctgtgagcacaaagggccccagggacgctgggtggaagcactgccgtgtgcct

SEQ ID NO: 72701 - DNA, 110 bp, synthetic construct
  source 1..110: mol_type = other DNA
accctgtaaatgctttatgtgtttgaaaaaaattaactcgacgttcccgttgtcgctcagcaggttaagaactcaactagtggagtgcctgtcgtggtgcagtggaaaca

SEQ ID NO: 72702 - DNA, 110 bp, synthetic construct
  source 1..110: mol_type = other DNA
taggaaactgggaatacataatatccacggaaggacacgtttaggcaaggaatggcttaagacagcaaaacggaaggcgccacggagcttgcttgcttgcttcatggccc

SEQ ID NO: 72703 - DNA, 110 bp, synthetic construct
  source 1..110: mol_type = other DNA
cttaagacagcaaaacggaaggcgccacggagcttgcttgcttgcttcatggccccttttcaacaactctggagcgctattccaaatccaggcggttcctcctgctgccc

SEQ ID NO: 72704 - DNA, 110 bp, synthetic construct
  source 1..110: mol_type = other DNA
aacaacaataaagccaaaaaaaaaaaaacaaaacaaaaaaccaaaaaataaccgtgtggatgaaccttgagaatgtgacgctcagtgaagtatgcccgccgcaaaaggcc

SEQ ID NO: 72705 - DNA, 110 bp, synthetic construct
  source 1..110: mol_type = other DNA
gtggatgaaccttgagaatgtgacgctcagtgaagtatgcccgccgcaaaaggccaggaggtccctagagaagtcaaacctgtagacacaaagtaggaccacggggacca

SEQ ID NO: 72706 - DNA, 110 bp, synthetic construct
  source 1..110: mol_type = other DNA
ggggccctgcggggttgccggtgggggtgtctgagcccctctgtccttccccatggaggtgggagggtgtattgactcagcaccagggatcctaactcctggtagagctt

SEQ ID NO: 72707 - DNA, 110 bp, synthetic construct
  source 1..110: mol_type = other DNA
agtaaaaacttcagaggttttagcgtttcataaatacttgatttttaatgttaccgtcattattttcgaatgcttattaacgtttattaagcgcctactgtctgccacgc

SEQ ID NO: 72708 - DNA, 110 bp, synthetic construct
  source 1..110: mol_type = other DNA
gtcattattttcgaatgcttattaacgtttattaagcgcctactgtctgccacgcagtaggttctggagacaaatttgggaacaaagtgcggaattcccccctgcccgga

SEQ ID NO: 72709 - DNA, 110 bp, synthetic construct
  source 1..110: mol_type = other DNA
tgatgattggtgggaaagagaaactcttcttgctgggactgctgagctgagagaatataaagcgagagctgctggggaaatcctttctgcctgcctggacatgctgtgaa

SEQ ID NO: 72710 - DNA, 110 bp, synthetic construct
  source 1..110: mol_type = other DNA
tggccagcaggctcgtgatgccttgaaaaaaaaaaggcagagagggggttacgaaccggggcacgtcccctgtggtggctcagcgttcagtcagaccggtcccagggccg

SEQ ID NO: 72711 - DNA, 110 bp, synthetic construct
  source 1..110: mol_type = other DNA
cctggcctcagctccttcatctgtagtcacagcatccaccccggttatcgaaagagtgaaatgagttcatacactgcgactggcccgtgacagtgcaagtgtcccttgtc

SEQ ID NO: 72712 - DNA, 110 bp, synthetic construct
  source 1..110: mol_type = other DNA
gaaaatcgttgccgttgtgcggcaaactcaagtgttgcttgctggaactttctggaattttaattgtttttcaaacttttttggacccgtgatggggaatccatggctac

SEQ ID NO: 72713 - DNA, 110 bp, synthetic construct
  source 1..110: mol_type = other DNA
aattttaattgtttttcaaacttttttggacccgtgatggggaatccatggctacagagggctggcggaaaggatagatctcagaggctatttcgtgaagactagacaag

SEQ ID NO: 72714 - DNA, 110 bp, synthetic construct
  source 1..110: mol_type = other DNA
cgagagggaagtgagttccctgaggtcatagtgccatctgccttggggacccaactgtctcctctgtgaggggcctggtccagctccctcccaccaaaggggcgtttggg

SEQ ID NO: 72715 - DNA, 110 bp, synthetic construct
  source 1..110: mol_type = other DNA
ccagcagggagcagagccgggacgacggagcccatgggcagctggacaggtggtgacataggggtggaactgaccttgaggggcgttgcagacatagaagtgggctgagc

SEQ ID NO: 72716 - DNA, 110 bp, synthetic construct
  source 1..110: mol_type = other DNA
caccccagcgcccacctggccatctcggacagcgaccacctgatgcacttgagcgtcttcttcatcatagaggagttttgcagcaggaagaaggggcgcaggagccggcg

SEQ ID NO: 72717 - DNA, 110 bp, synthetic construct
  source 1..110: mol_type = other DNA
ggcctggggtttctgccacctaaacacagacaatcccgaacaaacaaggatccacgccgagatgcagctggggctgcccatacacttgcagcccatttattccgagtcaa

SEQ ID NO: 72718 - DNA, 110 bp, synthetic construct
  source 1..110: mol_type = other DNA
gccgagatgcagctggggctgcccatacacttgcagcccatttattccgagtcaaagtaggtgccgcacgtaaccaggcaccaggcagggtgtcaggccaccgagctaac

SEQ ID NO: 72719 - DNA, 110 bp, synthetic construct
  source 1..110: mol_type = other DNA
ccagcaatgaccttggccttgaatgtatccggcgtggagcaagcagcagacccacgtgttgtcacccacacagaccacagcttcaggggacatatgtccacctggctctt

SEQ ID NO: 72720 - DNA, 110 bp, synthetic construct
  source 1..110: mol_type = other DNA
gtgttgtcacccacacagaccacagcttcaggggacatatgtccacctggctctttgaagcccctcttgctggtctcaggaagaagaggactcttcctcctctcagagtg

SEQ ID NO: 72721 - DNA, 110 bp, synthetic construct
  source 1..110: mol_type = other DNA
gtactctggtccctcgtgctgctgggcgccattgaataacgtttctccgagaagatcattagaaatcgtgtgtattgcttctgagccttggctgctgctttttttttttt

SEQ ID NO: 72722 - DNA, 110 bp, synthetic construct
  source 1..110: mol_type = other DNA
tctttggaagtgatgctctccaggtcactggactccagcacctcccacagctcagcccggatcgcctgctccatctgctcctgttctgagggcctgggaacggagcccat

SEQ ID NO: 72723 - DNA, 110 bp, synthetic construct
  source 1..110: mol_type = other DNA
aaaaatgagtagcatgtatagctgttacactatgaaaatattcttctggaattcaaaaactactatctgacttagcaaagaatttgcttaattcatggacaaacaagcga

SEQ ID NO: 72724 - DNA, 110 bp, synthetic construct
  source 1..110: mol_type = other DNA
aaaactactatctgacttagcaaagaatttgcttaattcatggacaaacaagcgatattccaacctaagtcttgtttcacttcttactccttaaagtaaatgaaagtagc

SEQ ID NO: 72725 - DNA, 110 bp, synthetic construct
  source 1..110: mol_type = other DNA
cttatttttgttctttaccttgcatctgagctcagtctgatttctttatctcctagcttttgaagttacaggttttcctctctgccatctcccttcccttcctcttcccc

SEQ ID NO: 72726 - DNA, 110 bp, synthetic construct
  source 1..110: mol_type = other DNA
gcttttgaagttacaggttttcctctctgccatctcccttcccttcctcttccccagacctcacttccccagccccaccaactggtgtttagaagcaggtgccctgtgga

SEQ ID NO: 72727 - DNA, 110 bp, synthetic construct
  source 1..110: mol_type = other DNA
ctccagtgagcagctccttgttaacgctgcatttcctgagcccttgacatgagtctgaaccaggaagactggctccccaggtgagcggccgtttggttgggcaggtgtgg

SEQ ID NO: 72728 - DNA, 110 bp, synthetic construct
  source 1..110: mol_type = other DNA
tgaaccaggaagactggctccccaggtgagcggccgtttggttgggcaggtgtggagtgtggccaggccagtatctgtttagttcagagcccagagagggagaaaagata

SEQ ID NO: 72729 - DNA, 110 bp, synthetic construct
  source 1..110: mol_type = other DNA
cataaaactcgtagaagaaaacaggctcttgatgttggtcttggcaaagatgtgttttgttttgctttttcccccaaaagcaaaggcaataaaagcaaaaaaagtgggat

SEQ ID NO: 72730 - DNA, 110 bp, synthetic construct; identical to SEQ ID NO: 72729
  source 1..110: mol_type = other DNA

SEQ ID NO: 72731 - DNA, 110 bp, synthetic construct
  source 1..110: mol_type = other DNA
gagtctgatggcagtgagagcccatctgttacaatgaaagctactctccttactcagccctgaggcctgtcataaccagaccggcttttgcggaggctctgtcccctcct

SEQ ID NO: 72732 - DNA, 110 bp, synthetic construct
  source 1..110: mol_type = other DNA
ctcgaggcaaaacgcttctcaatttgacgctggcagctgttgtacttcctgagtcctgcagtggttgttttttgacacctctgcccagtgtattcttgtcttagaggaga

SEQ ID NO: 72733 - DNA, 110 bp, synthetic construct
  source 1..110: mol_type = other DNA
ccatcctgatccctctctcctgattggcatcaaatacactctagaacctccgctacctgaaaaaacttcgagggtataaaaacttgattagatactggttaaaacaaaat

SEQ ID NO: 72734 - DNA, 110 bp, synthetic construct
  source 1..110: mol_type = other DNA
cctgaaaaaacttcgagggtataaaaacttgattagatactggttaaaacaaaataaaaactaaaaagacatttcgggagacgatcaatgttttatagcgctcccagcat

SEQ ID NO: 72735 - DNA, 110 bp, synthetic construct
  source 1..110: mol_type = other DNA
ccaccaaggttgggggtcagagagatcaacgcaggtgacttcagctctaggccttctcttacattttgcacaaaccacggccgaaactccagctcgctccctgcacctcc

SEQ ID NO: 72736 - DNA, 110 bp, synthetic construct
  source 1..110: mol_type = other DNA
ctcttacattttgcacaaaccacggccgaaactccagctcgctccctgcacctccccaaagtggcatcgcttcagtgccctcctcccgcctcataaaagtccggggtttc

SEQ ID NO: 72737 - DNA, 110 bp, synthetic construct
  source 1..110: mol_type = other DNA
cttctgggcatggggtcccgagcagctgcaaggctgcacactcgtgaagttggtgtgttcagagcctgcctttccttcaagctagctctgggccaggaccacataggttg

SEQ ID NO: 72738 - DNA, 110 bp, synthetic construct
  source 1..110: mol_type = other DNA
tgttcagagcctgcctttccttcaagctagctctgggccaggaccacataggttggcagcccttctcctgacttgtgctactcagtgacttcatttctgcttggtgcatc

SEQ ID NO: 72739 - DNA, 110 bp, synthetic construct
  source 1..110: mol_type = other DNA
gtgacagggtgaagaggaggccctggagttgggcgcctggaccaggtgagcttgtggagctgtgctttccctccccctgcatcgtaccctaagtctaagtgggagtgtag

SEQ ID NO: 72740 - DNA, 110 bp, synthetic construct
  source 1..110: mol_type = other DNA
ggagctgtgctttccctccccctgcatcgtaccctaagtctaagtgggagtgtagggaggattggcggtgttgtaatcgcgtagcacaacgcaggggaacagcagagagg

SEQ ID NO: 72741 - DNA, 110 bp, synthetic construct
  source 1..110: mol_type = other DNA
tcctatctcccttggtctcccaaagacccactgaggcagctctgaagagcatccgcattttacagatggaggcactggggcagcgtggagcaaactgccaggatttttac

SEQ ID NO: 72742 - DNA, 110 bp, synthetic construct
  source 1..110: mol_type = other DNA
tgactctccatccagccacaatagcacctaataatagcaaaactaagatcttcgacccctagcctgggaacttccatatgcgacgggtgttgccctaaaaagccaagaca

SEQ ID NO: 72743 - DNA, 110 bp, synthetic construct
  source 1..110: mol_type = other DNA
aacgttgaaaactgaggcaaaggaaatatttttagaggcttaattttatggtaaagaatcttattttgtataagaacttttttttggcgggaaatttggcagaaaaggtg

SEQ ID NO: 72744 - DNA, 110 bp, synthetic construct; identical to SEQ ID NO: 72743
  source 1..110: mol_type = other DNA

SEQ ID NO: 72745 - DNA, 110 bp, synthetic construct
  source 1..110: mol_type = other DNA
gcatcctcatggatgctagtctgattcgtttgcactgagtcatgacaggaactccctgtgttcagctctttgaagcagactgaattttccttctgcagaatatgtgtgac

SEQ ID NO: 72746 - DNA, 110 bp, synthetic construct; identical to SEQ ID NO: 72745
  source 1..110: mol_type = other DNA

SEQ ID NO: 72747 - DNA, 110 bp, synthetic construct
  source 1..110: mol_type = other DNA
actgtgatggatcctggcagaggcctaagccagcctaaaaggagctctagaggtgagaggacctgtccttttcacctctctgcgaattagtttgtggctgcaggctgcca

SEQ ID NO: 72748 - DNA, 110 bp, synthetic construct
  source 1..110: mol_type = other DNA
ccaaccaatcgggcgtctggctgcctgaacgacagctatcagtacccagttggagacgccgtcctgagccagggggcgggttggtggggagtgaaccaatcggtgacgag

SEQ ID NO: 72749 - DNA, 110 bp, synthetic construct
  source 1..110: mol_type = other DNA
acgccgtcctgagccagggggcgggttggtggggagtgaaccaatcggtgacgagagaaggcaaattcgagccaattaaaactgagaaggcgaggagtggaggaacacgc

SEQ ID NO: 72750 - DNA, 110 bp, synthetic construct
  source 1..110: mol_type = other DNA
cggattaaggattgggcattgtcactgctgtagcttgggtcaccactatggtgtgggttctctgcctggccctgaaacctgcgtgccccaggtgcagccatgagtaaatg

SEQ ID NO: 72751 - DNA, 110 bp, synthetic construct
  source 1..110: mol_type = other DNA
ggttctctgcctggccctgaaacctgcgtgccccaggtgcagccatgagtaaatgaataaatagaatgtataaataagaccccctaatccaatgcctcacttgtttgttc

SEQ ID NO: 72752 - DNA, 110 bp, synthetic construct
  source 1..110: mol_type = other DNA
gggcaaacctacctgcgttgaactcggcatcgtcttccaggacaacgacggctccttccacagcgtcaacggcgctccctccttctttgaggatgttgtaacccacggtg

SEQ ID NO: 72753 - DNA, 110 bp, synthetic construct
  source 1..110: mol_type = other DNA
ttccacagcgtcaacggcgctccctccttctttgaggatgttgtaacccacggtggcggctttgacgatgccctggcggacccgctctttccggtccttggagatgcagc

SEQ ID NO: 72754 - DNA, 110 bp, synthetic construct
  source 1..110: mol_type = other DNA
ggtggatgggcagggcctcacgctggctccaccgaagacgtggacttttatcctgagggcagaggagagcttaggaggaatttgaagcagaggagtgaagttctcagctt

SEQ ID NO: 72755 - DNA, 110 bp, synthetic construct
  source 1..110: mol_type = other DNA
ccttatgccaaagagatacattttttggtggtgaactctgctctcctgtgcctttgaaaaatcctcaagctgtttcacaatccagaagctaaattgataaatgctccata

SEQ ID NO: 72756 - DNA, 110 bp, synthetic construct
  source 1..110: mol_type = other DNA
gaaaaatcctcaagctgtttcacaatccagaagctaaattgataaatgctccatatctcattgaaccagttccacaatggtgaggatagctgtcagttcagttaaacagt

SEQ ID NO: 72757 - DNA, 110 bp, synthetic construct
  source 1..110: mol_type = other DNA
cttccggctgaactgcgcgcctgctcctgccgacgtgttcttccggtggcggaacggcggtttaccctgtgcccggcaaaatggtgagaggattgagaggtgtttcccac

SEQ ID NO: 72758 - DNA, 110 bp, synthetic construct
  source 1..110: mol_type = other DNA
aagcccacctgcaggcatcctctgaagcacagtactgggaggtgataggcatcgaattctccagcacctggatggaggtcagggatggcactgggtctgcaaggagagag

SEQ ID NO: 72759 - DNA, 110 bp, synthetic construct
  source 1..110: mol_type = other DNA
attctccagcacctggatggaggtcagggatggcactgggtctgcaaggagagaggccgttgggttggggcaggaaagagggtgacaagggtacaagtgagaagcagcca

SEQ ID NO: 72760 - DNA, 110 bp, synthetic construct
  source 1..110: mol_type = other DNA
cccgtcaatggggcgcttgtcaattcatgccccaaacatggcggaaatcccgtcggccacgtggctgcgggcagggcaggccggggcctaaggatgctggccgggcctag

SEQ ID NO: 72761 - DNA, 110 bp, synthetic construct
  source 1..110: mol_type = other DNA
gccacgtggctgcgggcagggcaggccggggcctaaggatgctggccgggcctagttgatctgaacctagggctaacagggtctgtctccccgctgtcgagtgtgcgccc

SEQ ID NO: 72762 - DNA, 110 bp, synthetic construct
  source 1..110: mol_type = other DNA
agaggttggtgtgttttgagcataaagagaacagatccagctttacaaatgtatgtgtccagactgagtgagaagaggctggcttgcttctatgacatgtgccctctctg

SEQ ID NO: 72763 - DNA, 110 bp, synthetic construct
  source 1..110: mol_type = other DNA
agaatgggatgaggcatttacattacagggaagctccttttgtttggagtaggactactgactggggtccttggcatctgcgcacctcatccaggacaaggaggttcttg

SEQ ID NO: 72764 - DNA, 110 bp, synthetic construct
  source 1..110: mol_type = other DNA
tctgttccacaagcccaccatgagcagccaggaaggccccattggctcatcctcatctcagccatccccatgggctgtccccatcttggtcagtgagctgtcccaccgtc

SEQ ID NO: 72765 - DNA, 110 bp, synthetic construct
  source 1..110: mol_type = other DNA
tctcagccatccccatgggctgtccccatcttggtcagtgagctgtcccaccgtcacctgttgggattgtgtgttcttggaggttgggttgctgagcctccgctaacttc

SEQ ID NO: 72766 - DNA, 110 bp, synthetic construct
  source 1..110: mol_type = other DNA
agcagaggcgtggcacatgatttgacacaatgttttaacaggatccctttggctgcagctgccggaaaggtgtgtgcgtgtgtcaggaggagagcagggctagtttgtgc

SEQ ID NO: 72767 - DNA, 110 bp, synthetic construct
  source 1..110: mol_type = other DNA
atgttatcgacgtcaagttcctgtatggttgccaagcgcctaccatctgctttgtctaccaggtactggagcaggaggagagcgggagaagctgtatggcttggcatggt

SEQ ID NO: 72768 - DNA, 110 bp, synthetic construct
  source 1..110: mol_type = other DNA
ctaccaggtactggagcaggaggagagcgggagaagctgtatggcttggcatggtgggggttcatttttgctaatcagaatgtctggctttcgtggtggggtaggcagaa

SEQ ID NO: 72769 - DNA, 110 bp, synthetic construct
  source 1..110: mol_type = other DNA
tgttgcataagctatatgagctcttggatcctcagtcttttcattggcagaaaagttgaaaacaataaccccacaccctaagtagaatgtgctggctcgtaagtaagagg

SEQ ID NO: 72770 - DNA, 110 bp, synthetic construct
  source 1..110: mol_type = other DNA
tccagcccgctgccagctgagtggtgctggggtgggcctgccggtcaagtctcttgtgcttttaggtccaggacctgcagctggagcgcgagatggcactggccaccaac

SEQ ID NO: 72771 - DNA, 110 bp, synthetic construct
  source 1..110: mol_type = other DNA
tctccaggcagagctgggcactggtccatgcagctgggctaaaaccccagcctctgagccggtggaggattcctctggaaaatccatgccaattgccccccccctatcca

SEQ ID NO: 72772 - DNA, 110 bp, synthetic construct
  source 1..110: mol_type = other DNA
cccaccctggtcctatcagagttgaggacaaagagccctctgataagccctcagtgggacttagctgatgctgcagtctgtatttctccagcacatactcagactatttt

SEQ ID NO: 72773 - DNA, 110 bp, synthetic construct
  source 1..110: mol_type = other DNA
ggccacatactaagaaactcaaaccctcctccgtgggtctaatcttcttggaatggaattacgtgtggaaattgattttcatattttccttttcatttagctcaatccca

SEQ ID NO: 72774 - DNA, 110 bp, synthetic construct
  source 1..110: mol_type = other DNA
gaattacgtgtggaaattgattttcatattttccttttcatttagctcaatcccaataacacagtcaataaccttggcttctctctttgcacattcaataaagtatcagc

SEQ ID NO: 72775 - DNA, 110 bp, synthetic construct
  source 1..110: mol_type = other DNA
cagactcaccaagccagttgctgcaccaaaaccttcacctgtgcctgaaacactcagatctgttttcctttggctggttcgtgccattctggcctcagctataaatgtca

SEQ ID NO: 72776 - DNA, 110 bp, synthetic construct
  source 1..110: mol_type = other DNA
agatctgttttcctttggctggttcgtgccattctggcctcagctataaatgtcacctcctcaaaggagtcttctctggctgtccaatgaagcaagtccactcttgttcc

SEQ ID NO: 72777 - DNA, 110 bp, synthetic construct
  source 1..110: mol_type = other DNA
aggatggttttaggacttatgtaaatcaggacacttgtgagagtgaagtgggatgctattaataattatgttgggatgatgtgcatgaaccaggagtgtccccaacaaac

SEQ ID NO: 72778 - DNA, 110 bp, synthetic construct
  source 1..110: mol_type = other DNA
ttatcattccatctccctcactgctgcaaaatatatcctcttggagagaattcgaaagtcagaatatctgctggtacctccctcagctagcatggaagggtggggataac

SEQ ID NO: 72779 - DNA, 110 bp, synthetic construct
  source 1..110: mol_type = other DNA
taatgaatgttagttctcatgtagattttcaagaatacagactccaccatcctcactttatagacgaagcctagcatgattcagggatttcttcaagccttgagttaata

SEQ ID NO: 72780 - DNA, 110 bp, synthetic construct
  source 1..110: mol_type = other DNA
ctttatagacgaagcctagcatgattcagggatttcttcaagccttgagttaatatcaaagttactcttatcagaatcattatttttaccatatagagagatgacagatt

SEQ ID NO: 72781 - DNA, 110 bp, synthetic construct
  source 1..110: mol_type = other DNA
ggattggtgtactaaattatctgcaataaaaggcagaacttgacttcaaacccgaagctctaactctagatccagagtatttaactagtggattaaagtgggactgactt

SEQ ID NO: 72782 - DNA, 110 bp, synthetic construct
  source 1..110: mol_type = other DNA
tccctggtttcaaatctttggagtaatgtaaggtttgatattcttgggactcattccatatcctttgccaactttcgttgccatcgtccctactaacacagtcactaaca

SEQ ID NO: 72783 - DNA, 110 bp, synthetic construct
  source 1..110: mol_type = other DNA
ccatatcctttgccaactttcgttgccatcgtccctactaacacagtcactaacatttatccactatccaagctgtgtaattccacagtgtccagggtttttgtctgttt

SEQ ID NO: 72784 - DNA, 110 bp, synthetic construct
  source 1..110: mol_type = other DNA
ttttttcaattaatgtcttttttttctcttccaagatccaatccaggatacaatattgtacagagctgtcatgtcacctcagtctttcctgatgtgtgacagtttctcag

SEQ ID NO: 72785 - DNA, 110 bp, synthetic construct
  source 1..110: mol_type = other DNA
caaggcatcccattcataccttttgactagaagtcgcctctctccatcatggttacatcaactgacatctcaagagaaactgcatatctgaaaaaattttttagctactg

SEQ ID NO: 72786 - DNA, 110 bp, synthetic construct
  source 1..110: mol_type = other DNA
catcaactgacatctcaagagaaactgcatatctgaaaaaattttttagctactgtattaggtgcttgcctaaatcaagaatcattccacctcaaagttaaacttattct

SEQ ID NO: 72787 - DNA, 110 bp, synthetic construct
  source 1..110: mol_type = other DNA
gccataaaggaaagattgacagtggccacaaaataatcataaattatctgaaagttgaactaatatttccaaaattgagacctaatttcagtcaagtgatatttggggat

SEQ ID NO: 72788 - DNA, 110 bp, synthetic construct
  source 1..110: mol_type = other DNA
tgaactaatatttccaaaattgagacctaatttcagtcaagtgatatttggggattttaagcactggcttttgaccaccaccatcaattctcactgtaaaaaatgtagaa

SEQ ID NO: 72789 - DNA, 110 bp, synthetic construct
  source 1..110: mol_type = other DNA
gttaagatccaattccttaccaattaactctttgttgcgagcatctacagccagatttcttagtgctccagatgcagctttcacaacccgctcatgttcattagtcagga

SEQ ID NO: 72790 - DNA, 110 bp, synthetic construct
  source 1..110: mol_type = other DNA
ctttcaatactaaaataaaaaatgggtaggtttccccagctctgtacgtactagggtgtcaactggaaggatggcacctaaaatgtggagccctagcattgcctctttct

SEQ ID NO: 72791 - DNA, 110 bp, synthetic construct
  source 1..110: mol_type = other DNA
gccgggctgaggagaagccgtccgggctcgtcctcagcctatggcaacaatcacagagctccaaagtatagggagtggctgtaggccggctgactcatgatgagactccc

SEQ ID NO: 72792 - DNA, 110 bp, synthetic construct
  source 1..110: mol_type = other DNA
atctttagttcctttgctacaacccaggaaagtggccacagatccactttcccaaggtgtgggcctttttggagatctgcggcctctgcctgcaggtaaagcgtgaagaa

SEQ ID NO: 72793 - DNA, 110 bp, synthetic construct
  source 1..110: mol_type = other DNA
ggtgtgggcctttttggagatctgcggcctctgcctgcaggtaaagcgtgaagaaaggaatgggaaaccgaggcttgcagggaagagagagggaggccagacggctcagg

SEQ ID NO: 72794 - DNA, 110 bp, synthetic construct
  source 1..110: mol_type = other DNA
gtcaataaaccttttttaatctgggaaggcccacatttgaaggtggtatcactgtattgtaggagctgagaagaatgacatgtctccattgtagggtaatttattttcct

SEQ ID NO: 72795 - DNA, 110 bp, synthetic construct
  source 1..110: mol_type = other DNA
aattactccaagtgggaataattcctggaatgcaagattggctcatcatttggttcatcaaaggcaaatcagataaagtgatacactacattaacagaatggagcttaaa

SEQ ID NO: 72796 - DNA, 110 bp, synthetic construct
  source 1..110: mol_type = other DNA
catcaaaggcaaatcagataaagtgatacactacattaacagaatggagcttaaaaaccttattgtcttctaggcagatgcagaaaaatcattggaccgaatttaacctt

SEQ ID NO: 72797 - DNA, 110 bp, synthetic construct
  source 1..110: mol_type = other DNA
tgcttcccgggccttctgaaaagcagggactggaaggttggagggttcacatgtccaggaaactttgaaaggcagaataataagtctgggctggatctgatgtgctgtag

SEQ ID NO: 72798 - DNA, 110 bp, synthetic construct
  source 1..110: mol_type = other DNA
caggaaactttgaaaggcagaataataagtctgggctggatctgatgtgctgtagagcgcaaaccaggtgtccaacgctgcctccaggcaccccttgtgcctcaggttcc

SEQ ID NO: 72799 - DNA, 110 bp, synthetic construct
  source 1..110: mol_type = other DNA
gagccacaacagaaactccatgtttttttgttggttgttttcttttcttttttggctaccctggggcatgcatagggagttcgaagccagagttgcagcctacatcacac

SEQ ID NO: 72800 - DNA, 110 bp, synthetic construct
  source 1..110: mol_type = other DNA
ctaccctggggcatgcatagggagttcgaagccagagttgcagcctacatcacactaatgtcagatccttaatccactgtcccaggccgggattgaacctgcatcccagc

SEQ ID NO: 72801 - DNA, 110 bp, synthetic construct
  source 1..110: mol_type = other DNA
tgtaacttcaaatggagcctctcatccagcacagtaatggttttccttggcaacaacaatacagcgcacagggaggccctgttctaaaaccagtgccttgggtgtcctgg

SEQ ID NO: 72802 - DNA, 110 bp, synthetic construct
  source 1..110: mol_type = other DNA
aaacccatgtcctcatggatagtagtcaggcttgtctccactgagccacagtgggaagtccggcactgacatttttttgaagactacctgttgtctggtagaatgtccct

SEQ ID NO: 72803 - DNA, 110 bp, synthetic construct; identical to SEQ ID NO: 72802
  source 1..110: mol_type = other DNA

SEQ ID NO: 72804 - DNA, 110 bp, synthetic construct
  source 1..110: mol_type = other DNA
aacagatagcaccaaccagaagagttggcagatccagtaatgtttgtctacagatcttaaccagctcaggaaggaacttatttggtagtttgatgagctgctttgatttt

SEQ ID NO: 72805 - DNA, 110 bp, synthetic construct
  source 1..110: mol_type = other DNA
ggtgtggggcggctttatacaatgctgtccgcttccccgctgtgaaaaccgagccgattccttccgccggccttgcggtctgtggcaattacttaaatgtctccagctcc

SEQ ID NO: 72806 - DNA, 110 bp, synthetic construct
  source 1..110: mol_type = other DNA
attttttgattattggggaagaaatcactctggtcacactatacagaccagattataggctgggcaagagcggattctgggaaactgttaagaagctgtggctgaaattc

SEQ ID NO: 72807 - DNA, 110 bp, synthetic construct
  source 1..110: mol_type = other DNA
taggctgggcaagagcggattctgggaaactgttaagaagctgtggctgaaattcatgtgaaagatatgtgcactaggataatcacggtggaggggaagaaaaatggatg

SEQ ID NO: 72808 - DNA, 110 bp, synthetic construct
  source 1..110: mol_type = other DNA
gaaaacctagagtttatttaatccagtctcttcctcttcttctctccctccctccctttctctctcttttttaagatgatgaaaaacttaagtgcagagaggggaagtga

SEQ ID NO: 72809 - DNA, 110 bp, synthetic construct
  source 1..110: mol_type = other DNA
ctttctctctcttttttaagatgatgaaaaacttaagtgcagagaggggaagtgactttttaaagaggcgcttgtagcaaagatggggttcaaactcctgggtcctaaag

SEQ ID NO: 72810 - DNA, 110 bp, synthetic construct
  source 1..110: mol_type = other DNA
cattgtgtaggtcaatagccagacatcaccttcatcccacctgagacacagctgagctgccccctgagaaaatactcgctttggaaagatgtggactaataaaaggagac

SEQ ID NO: 72811 - DNA, 110 bp, synthetic construct
  source 1..110: mol_type = other DNA
tgaaccaaggatgctgagatggagagaactggagggaaagtattctagatgtcggaaatagcatgtgcaaaggccctgtggcagcactagaaaagacagttttaagctgc

SEQ ID NO: 72812 - DNA, 110 bp, synthetic construct
  source 1..110: mol_type = other DNA
aaagtgagggaacaagcctttccttgtgagccatgctctggtaaaggtagaaataggaaaggccggccaggctcaggcggctcttctagctttaatgtctgtccttctgg

SEQ ID NO: 72813 - DNA, 110 bp, synthetic construct
  source 1..110: mol_type = other DNA
taggaccagggatgtcccttgggtcttgtcgttacctttgtctcatctgcctcctggagaattgcaatagctcccctggtggtcccccttcctctagtctccatctgctg

SEQ ID NO: 72814 - DNA, 110 bp, synthetic construct
  source 1..110: mol_type = other DNA
ggagaattgcaatagctcccctggtggtcccccttcctctagtctccatctgctgccatccattctccacgtgctgccagaatttgttgattcaagccgtcgccacctaa

SEQ ID NO: 72815 - DNA, 110 bp, synthetic construct
  source 1..110: mol_type = other DNA
ggccttttatatagctgattatagatcttgcatctcttgattagaggcccttatggcaccgtgtacgttgcttttatagtttttacccacagtggtaagcacacttttta

SEQ ID NO: 72816 - DNA, 110 bp, synthetic construct
  source 1..110: mol_type = other DNA
aacatggtgtagatgggttgaatgttggcccatgtgatgcagagggaaatccaatagatttggatcccatttaaaagaaggaacagctgcatctatggatgctcctcact

SEQ ID NO: 72817 - DNA, 110 bp, synthetic construct
  source 1..110: mol_type = other DNA
cctgaccgtgacaggccttgttgtggttcatggtccatctggagccactccgcagggattccaagcccagcttcaccccccatatgaccttggaaactcacctctctgtg

SEQ ID NO: 72818 - DNA, 110 bp, synthetic construct
  source 1..110: mol_type = other DNA
ggattccaagcccagcttcaccccccatatgaccttggaaactcacctctctgtgcctcagtttccttagtcagtggagaataataatggtatctgccgcatgaggttat

SEQ ID NO: 72819 - DNA, 110 bp, synthetic construct
  source 1..110: mol_type = other DNA
gcctgggaaggcttgctgctcacactggagaactgtctgcccgcccggccaggactgactccgggagcagccaagctccatcggaactatggggctggctgcccccaagg

SEQ ID NO: 72820 - DNA, 110 bp, synthetic construct
  source 1..110: mol_type = other DNA
tgactccgggagcagccaagctccatcggaactatggggctggctgcccccaagggacaaaaagaggtcctttgggctccaagaagcagccttcctcaaggctaaagacc

SEQ ID NO: 72821 - DNA, 110 bp, synthetic construct
  source 1..110: mol_type = other DNA
tggcacaggatcgcacttagccctgcagctggcatggagaagccctctgtcaacgccggttaatctgacgcttccgattacctgggactcaaacctggttccatgtgcac

SEQ ID NO: 72822 - DNA, 110 bp, synthetic construct
  source 1..110: mol_type = other DNA
agaggctgaggctttgcatctatgaacgtaccctactttagtccttgcagatctgagcagagaccactcagtcaacactgtctgttgctccaccctatctgacacttgct

SEQ ID NO: 72823 - DNA, 110 bp, synthetic construct
  source 1..110: mol_type = other DNA
agcagagaccactcagtcaacactgtctgttgctccaccctatctgacacttgctctggctatggatctacaaggtgtggcctcacgaaggagggttcagactcacctct

SEQ ID NO: 72824 - DNA, 110 bp, synthetic construct
  source 1..110: mol_type = other DNA
catacatacatacacactgcaacatttattgagctcctgctgtgtgcagccactgttctgcatcctggagataaaatatttagaaaaaaagacaaaagacaaaacctctc

SEQ ID NO: 72825 - DNA, 110 bp, synthetic construct
  source 1..110: mol_type = other DNA
tcttggatactagtcgggtttgggctcattaccgatgaggcatgatgggaactcctagaatttttacttcttaaggctgtcaactctttttttttcggctgagccctcac

SEQ ID NO: 72826 - DNA, 110 bp, synthetic construct; identical to SEQ ID NO: 72825
  source 1..110: mol_type = other DNA

SEQ ID NO: 72827 - DNA, 110 bp, synthetic construct
  source 1..110: mol_type = other DNA
gtagaagacccgggttcttgcctgtttacacaacttgcctgttatatgacctcagacaggccatcaagctctgtgagtctcattacgtctgctttacagacgagaaagaa

SEQ ID NO: 72828 - DNA, 110 bp, synthetic construct
  source 1..110: mol_type = other DNA
cttgacaataatgaattctaccaaacgtatcaacagttgataatttactagtaaacaaacccagatatttttctaagtaggcatacaatgaattcacaaaacctgcactt

SEQ ID NO: 72829 - DNA, 110 bp, synthetic construct
  source 1..110: mol_type = other DNA
gccacggtgctcgcgcccacccagtacaggaagcccgctgcaggcagagctgtttccatggctttcaaccgggcctcactaccttcgcgaatgaaaaagacgaatgaatg

SEQ ID NO: 72830 - DNA, 110 bp, synthetic construct
  source 1..110: mol_type = other DNA
aggtgtcagttattacttaccagttttgcacgaaatcctctgagagctcttctgttgaactctcagatccgtcagcaaccaacccttattcagtggcccttgttttcctg

SEQ ID NO: 72831 - DNA, 110 bp, synthetic construct
  source 1..110: mol_type = other DNA
tgaactctcagatccgtcagcaaccaacccttattcagtggcccttgttttcctgttgttacccaccagccccaagtaaccttccctgactgagtggaagaagcctcccc

SEQ ID NO: 72832 - DNA, 110 bp, synthetic construct
  source 1..110: mol_type = other DNA
gttctgaggagtaaagcaaatgggaggattagggcccagttagtattagagtcccacagctagattgagcccatggaagggtccaaagcagcctgggttgtgggtcagga

SEQ ID NO: 72833 - DNA, 110 bp, synthetic construct
  source 1..110: mol_type = other DNA
tcttaagcatgtatgtctcgagctgccccaagacacctagagtggatagagtggcaaacacagaatttcagaaatgccaagcttgacagctttgagcaactaaaattaag

SEQ ID NO: 72834 - DNA, 110 bp, synthetic construct
  source 1..110: mol_type = other DNA
tgccagagagagactgattcctggtgtttctctgtctgcatgttcaaatgaagttgcattagattggcaactgttgcaaagaaaaaggtgaaaacagttagccaaagttc

SEQ ID NO: 72835 - DNA, 110 bp, synthetic construct
  source 1..110: mol_type = other DNA
agaaatagactacaggacagtggttagctctcaggaggtttattgaggagtcttcttgggatcaacactcatggaaatgaaaacaaaaagtaggattgggcagaggggaa

SEQ ID NO: 72836 - DNA, 110 bp, synthetic construct
  source 1..110: mol_type = other DNA
ggatttgttaaccactgcgccacgacaggaactccaagatttttctcacctacatagcttgtcatcaaaaaacaaggacctattgtatagcacaggatacctgctcaata

SEQ ID NO: 72837 - DNA, 110 bp, synthetic construct
  source 1..110: mol_type = other DNA
ctcttagttggagagagcaaggaagacaggccaacagaaggcccaactccattaacaatttcgtcactgctcaaaacctaaccctgaagcctatatcacatattttggat

SEQ ID NO: 72838 - DNA, 110 bp, synthetic construct
  source 1..110: mol_type = other DNA
caatttcgtcactgctcaaaacctaaccctgaagcctatatcacatattttggatgccattttttttaacagtcccccatatgtccatgcacacttctgtttagtcactc

SEQ ID NO: 72839 - DNA, 110 bp, synthetic construct
  source 1..110: mol_type = other DNA
tactggaagacaggcaaagcagtccttggagagataaacaagaccttcttgctatggtccaggacatgctcttctgtactaagctgggcatcacaactagatgtgaggaa

SEQ ID NO: 72840 - DNA, 110 bp, synthetic construct
  source 1..110: mol_type = other DNA
ttatctaacacctggtataatgttttcgatgacttgcctgcacatgttttcagatgagaaatggaatcccaagtgtgagagctgttctgaaatattttggggccttctgg

SEQ ID NO: 72841 - DNA, 110 bp, synthetic construct
  source 1..110: mol_type = other DNA
ctctaaagaccaggactcctgggagtcttaaagaaagcacttagccccttggtagcatggatgagtaggaaaatgagccactcgtaccttcagccctccccacaccttcc

SEQ ID NO: 72842 - DNA, 110 bp, synthetic construct
  source 1..110: mol_type = other DNA
cacagagggtcctgtacttagttggctcttgttaagtattaagcaaccatgtacgtagtgaggagccatgtagcagggagggagctaacatacgtgtttgggttttagga

SEQ ID NO: 72843 - DNA, 110 bp, synthetic construct
  source 1..110: mol_type = other DNA
gactccactttcttgttccctttacgcaaaatgatccaagagctttgcctgtataatagcattctgagttcagtacttaaatacctggtgagttttcactacttacttta

SEQ ID NO: 72844 - DNA, 110 bp, synthetic construct
  source 1..110: mol_type = other DNA
atagcattctgagttcagtacttaaatacctggtgagttttcactacttactttaaagtgccatgttctaaatgatttttcttatcaaaatagtggggaaacacagatta

SEQ ID NO: 72845 - DNA, 110 bp, synthetic construct
  source 1..110: mol_type = other DNA
tggtcacattgctttctccttttctctaatcactctctgctcccctctttataggagggattatgaatgtatgcgatgtcacgaaaagctcatctggctaatttaggatg

SEQ ID NO: 72846 - DNA, 110 bp, synthetic construct
  source 1..110: mol_type = other DNA
aatatttgaaaaaattcgtagtgacaatgaaattaattgttctcaccatgtcaagattggcaattttgttctgcatcgtgaaatatctgacaatcatcagcttgagtcag

SEQ ID NO: 72847 - DNA, 110 bp, synthetic construct
  source 1..110: mol_type = other DNA
ccattgtccctctagttttacacgcactctttagggaggcaatattgaccaagaaattggttcatcacctcagtatccctgagtttaaaactcttggcacacatctattt

SEQ ID NO: 72848 - DNA, 110 bp, synthetic construct
  source 1..110: mol_type = other DNA
tggtgtatcacctgtaaagccagttctgcagtgtaaggtgggacattgttcctggaaccataacttgcttgaggaagattctctaggcctctcagtattctttaaaaaca

SEQ ID NO: 72849 - DNA, 110 bp, synthetic construct
  source 1..110: mol_type = other DNA
atgtaccaaatttatattcagagtgtttataacagccattgtcaaaattaaaagatcagttcagaaattctacactagtaaaattgcacctgaatactcctggctgcctc

SEQ ID NO: 72850 - DNA, 110 bp, synthetic construct
  source 1..110: mol_type = other DNA
atttgtaattgtcttctcatgtctttacctcctatgtctgggaaacacttggtccacatatctcatgtccatagtctattcagtgaagccttctctggctatcccatgtg

SEQ ID NO: 72851 - DNA, 110 bp, synthetic construct
  source 1..110: mol_type = other DNA
acatatctcatgtccatagtctattcagtgaagccttctctggctatcccatgtgaattagcaacccctaatgtccatccagctctattatttggtactgtatttatgac

SEQ ID NO: 72852 - DNA, 110 bp, synthetic construct
  source 1..110: mol_type = other DNA
gtgaaataagagcacagacttagaaactaaaatgtttaggttttagttctgtcaaaaaaagctctgttatgtgacttgtactctccatacttcggtttccttttatttaa

SEQ ID NO: 72853 - DNA, 110 bp, synthetic construct
  source 1..110: mol_type = other DNA
aatgagtattcatattcacagcacctcagactctggccctgacagctgaccctgccaacaagtttggaggcttttcctgtgatttcatatattggaataggaagggatgc

SEQ ID NO: 72854 - DNA, 110 bp, synthetic construct
  source 1..110: mol_type = other DNA
caacaagtttggaggcttttcctgtgatttcatatattggaataggaagggatgcatatggagttctccacttgggcttctcaacttgacttatgtagacaatgttcctt

SEQ ID NO: 72855 - DNA, 110 bp, synthetic construct
  source 1..110: mol_type = other DNA
gctgaaaaccactggccaaatgtatacacaaagctactgtgtacagcatccttgctgaatgccaagcaagtcatctcacgattgccttacaactaggaggcaggtcttat

SEQ ID NO: 72856 - DNA, 110 bp, synthetic construct
  source 1..110: mol_type = other DNA
ggctcactcaaaatcagctggttcaaagaatttttttcctcagagttcaaaaattcatgggaacttgaaatgacacacagattggccaaacatttctccacagtccgcct

SEQ ID NO: 72857 - DNA, 110 bp, synthetic construct
  source 1..110: mol_type = other DNA
catgggaacttgaaatgacacacagattggccaaacatttctccacagtccgcctttctcctcatcactgtaattctctataaaaccggccatactcataattcagagtt

SEQ ID NO: 72858 - DNA, 110 bp, synthetic construct
  source 1..110: mol_type = other DNA
ccatccagcatgcatgcccttttgcaatgttaccttgaagctcttcccattaaaaggtggtgtctatttctccattcctacacttgctttgtcttatggaacatttaaaa

SEQ ID NO: 72859 - DNA, 110 bp, synthetic construct
  source 1..110: mol_type = other DNA
aataatgaacatgcccataaagtttgtaccattttccattcttcctaccccaaacttctggaattagctgttataattcttctgtattaagttgaaatgtcagttttcaa

SEQ ID NO: 72860 - DNA, 110 bp, synthetic construct
  source 1..110: mol_type = other DNA
cggctcggattcagtccctggcccaggaacttccatgtatctcaggtgcagccaaaaaaaaaaaatttcctcagccttcccctacagtatttacttcttagggccaccac

SEQ ID NO: 72861 - DNA, 110 bp, synthetic construct
  source 1..110: mol_type = other DNA
aaaaaaaaaatttcctcagccttcccctacagtatttacttcttagggccaccacctttcgggatgtttccatgtatttggatgtttccacatttccagcagctacccct

SEQ ID NO: 72862 - DNA, 110 bp, synthetic construct
  source 1..110: mol_type = other DNA
gtgtcagatttccctattttgaaactggtgtttcccgagacactgttcatacaaagtgagcctggaatcatgcagcttgtgatgcccgatctggacacagagggcatttc

SEQ ID NO: 72863 - DNA, 110 bp, synthetic construct
  source 1..110: mol_type = other DNA
tcaagattttgttcagggtaagtcaatgacatgcagagttggaattcaaacttaggttgaattctaaagcccctatgctctactgcctccatatattagttatttttgct

SEQ ID NO: 72864 - DNA, 110 bp, synthetic construct
  source 1..110: mol_type = other DNA
gttgaattctaaagcccctatgctctactgcctccatatattagttatttttgctatgcaacaaactgtctcaaagctcagcagcttcaaacaacaagcattcataacca

SEQ ID NO: 72865 - DNA, 110 bp, synthetic construct
  source 1..110: mol_type = other DNA
tttctcaacacaagtcatccaatagcttaccagagcttatactaaatgatagagttgtcctagttttgaaacctatgaactccaactatgggatgtgcctacaatcaaaa

SEQ ID NO: 72866 - DNA, 110 bp, synthetic construct
  source 1..110: mol_type = other DNA
gccttggaagcagtgagggggttttagtgggttcaacctgagatgtgatgaagcagcagcacttcacgcaccggctgccctgccccgggctaagcttttccacaccctca

SEQ ID NO: 72867 - DNA, 110 bp, synthetic construct
  source 1..110: mol_type = other DNA
gcagcacttcacgcaccggctgccctgccccgggctaagcttttccacaccctcatcactagaggtgcccctgctctgttcatcctggatctccagtgtgtagggtgatg

SEQ ID NO: 72868 - DNA, 110 bp, synthetic construct
  source 1..110: mol_type = other DNA
acaataatatatttgagttcttctgcagacctaaacccctcaacaaatggaagatgttaatgattctttattccagaaaaacgacaaccagaccactgaaaccagctttg

SEQ ID NO: 72869 - DNA, 110 bp, synthetic construct
  source 1..110: mol_type = other DNA
agttcttctgcagacctaaacccctcaacaaatggaagatgttaatgattctttattccagaaaaacgacaaccagaccactgaaaccagctttgaaaacaatgcaagct

SEQ ID NO: 72870 - DNA, 110 bp, synthetic construct
  source 1..110: mol_type = other DNA
caaaacatgtacagaagaaacaagagagggaagagaattgaaatggaagcaacagaatgccagatgtgatattaaggggcttatgtagctatttcataatgacgccatgc

SEQ ID NO: 72871 - DNA, 110 bp, synthetic construct
  source 1..110: mol_type = other DNA
agcagaagccagaaggcaggtttctacttagaagagaaggaaggctctgggaagtacaatcacatgccttaggttccacgcaggtcaagaaccaagacgggtctgctccc

SEQ ID NO: 72872 - DNA, 110 bp, synthetic construct
  source 1..110: mol_type = other DNA
cgcgcaataagtgctcagggacttgtcttctttctccatcgaaaagtttggtcgtaaaacccgagtgttcttttctggccattggaatggctaaaaaggaaggttccaag

SEQ ID NO: 72873 - DNA, 110 bp, synthetic construct
  source 1..110: mol_type = other DNA
aagagcttcagaggccctgtaaaaagttggaacctgggccaagaatcctgatttagaataataatactaacctctatcaatatgaaaattgagttaactttaatgggaag

SEQ ID NO: 72874 - DNA, 110 bp, synthetic construct
  source 1..110: mol_type = other DNA
gaataataatactaacctctatcaatatgaaaattgagttaactttaatgggaagagaggaagctaaattgttttggaaaaacaaaatttgtgtagggttgtgtgacctc

SEQ ID NO: 72875 - DNA, 110 bp, synthetic construct
  source 1..110: mol_type = other DNA
tagcatgaagaatggtgccagccccagactgtatgctcagtagatagcttctgatgagataagtgaaggaacaaattgataacgtggatcgtatttggatctcaggtgta

SEQ ID NO: 72876 - DNA, 110 bp, synthetic construct
  source 1..110: mol_type = other DNA
gagataagtgaaggaacaaattgataacgtggatcgtatttggatctcaggtgtaaaaagtattttttaatttttattttttatgttatcttttcagggctgaacctggg

SEQ ID NO: 72877 - DNA, 110 bp, synthetic construct
  source 1..110: mol_type = other DNA
aaatgcatcgagttagccggtaaaaccaaaaagtaatttaaaaaattttattattattattattttttcagggctgcatgtatggcatgtggaagttccaaggtaggggt

SEQ ID NO: 72878 - DNA, 110 bp, synthetic construct
  source 1..110: mol_type = other DNA
ttccttcagttccttgatccttctgagctctctcccacctttgaacatctatgactgatttcccagtcatcttagggtctttccctgaacattcttattcaaccctcagc

SEQ ID NO: 72879 - DNA, 110 bp, synthetic construct
  source 1..110: mol_type = other DNA
cctatgcctatgatgcctagacatttacaaattgagtcctttaccagtactcgcgtgaggcaaccccgctggcctctaagatcttccagtagacaagggtgaaaacaatg

SEQ ID NO: 72880 - DNA, 110 bp, synthetic construct
  source 1..110: mol_type = other DNA
cactggctcctgtttgctcaaggccgggcttgttccttgccagcatttgctcaactacaagcagtagaaaggttactgtttaaccccgaaagggctgaactcagaaccca

SEQ ID NO: 72881 - DNA, 110 bp, synthetic construct
  source 1..110: mol_type = other DNA
gttgaggagggtggcagattaagggagagaaaaatgatgaaagaaatgttggcttaaattaaaggggtcagggtctatgaaaagcatggaatacattacacccagtaaaa

SEQ ID NO: 72882 - DNA, 110 bp, synthetic construct
  source 1..110: mol_type = other DNA
ctcagactcctcctttaatgttcctcaggcaggaacatgtacagcgtattgaaatgcacctgtgtgaccgaagtttccagcgtccccagttgcctgggacacggtgtctc

SEQ ID NO: 72883 - DNA, 110 bp, synthetic construct
  source 1..110: mol_type = other DNA
attctgatctgtaactgacagggacagccagcggtccccacaggggagcccttccttgcatgccaagcctctgaggactttggcagctgggctctgctatttagaaacct

SEQ ID NO: 72884 - DNA, 110 bp, synthetic construct
  source 1..110: mol_type = other DNA
ccagtggactttcggccaggcttcacacagaatgaagtagctgtttgatttaatgtcaacttccatgtgcctcccaccttcccccgttcattagatctagaagatatatg

SEQ ID NO: 72885 - DNA, 110 bp, synthetic construct
  source 1..110: mol_type = other DNA
cagacaatattggcactccattcaaaccttgcttcaagtcagtccgcacttcatcatctcccaatttgtccaaaacatactgtagctcaagtacagtttttaaacgtttc

SEQ ID NO: 72886 - DNA, 110 bp, synthetic construct
  source 1..110: mol_type = other DNA
atctcccaatttgtccaaaacatactgtagctcaagtacagtttttaaacgtttctgttcagcttcttctctcatgagctgctcccgacgtgctgtcttctttattgttt

SEQ ID NO: 72887 - DNA, 110 bp, synthetic construct; identical to SEQ ID NO: 72885
  source 1..110: mol_type = other DNA

SEQ ID NO: 72888 - DNA, 110 bp, synthetic construct; identical to SEQ ID NO: 72886
  source 1..110: mol_type = other DNA

SEQ ID NO: 72889 - DNA, 110 bp, synthetic construct
  source 1..110: mol_type = other DNA
tcacaagtctgcccacggtaattgctgctcaaacttgttttttctttcaaaagactacatcttaaatgactagagtttcggtttctttcatttgtctaaaacaaaagaaa

SEQ ID NO: 72890 - DNA, 110 bp, synthetic construct
  source 1..110: mol_type = other DNA
aattcctagtcagattggtttctgctgcaccacaacgggaactctacctttctttttaaagctaagaagaaaaagcagagtccctgtgtgtaaagactctggggaagaca

SEQ ID NO: 72891 - DNA, 110 bp, synthetic construct
  source 1..110: mol_type = other DNA
ttaaagctaagaagaaaaagcagagtccctgtgtgtaaagactctggggaagacagatgtgccaacaaatcagtacaagtacaaagcagagagtgtggaaagggctagaa

SEQ ID NO: 72892 - DNA, 110 bp, synthetic construct
  source 1..110: mol_type = other DNA
aaatgatgcctgcttctccaccactgctgcctacttcaccctcatctgtagacgtcaatattgcaatagattcctacctagctctcattaggctgtccacatagcttcta

SEQ ID NO: 72893 - DNA, 110 bp, synthetic construct
  source 1..110: mol_type = other DNA
agcaggttaaggatctcatgttactgccagctgcagcataggtctcagatgtgcctcagatctggtgttgtgcccctgtggcgtaggcctgcagctacagctctgatttg

SEQ ID NO: 72894 - DNA, 110 bp, synthetic construct; identical to SEQ ID NO: 72893
  source 1..110: mol_type = other DNA

SEQ ID NO: 72895 - DNA, 110 bp, synthetic construct; identical to SEQ ID NO: 72893
  source 1..110: mol_type = other DNA

SEQ ID NO: 72896 - DNA, 110 bp, synthetic construct; identical to SEQ ID NO: 72893
  source 1..110: mol_type = other DNA

SEQ ID NO: 72897 - DNA, 110 bp, synthetic construct
  source 1..110: mol_type = other DNA
gaaagagaaaagaatgcttagagtacggtcagtagacaaaataagaatggagacatgttaaaaatcattgaggctgagtgtcgagtacatggccatttactgtacttctc

SEQ ID NO: 72898 - DNA, 110 bp, synthetic construct
  source 1..110: mol_type = other DNA
tgttaaaaatcattgaggctgagtgtcgagtacatggccatttactgtacttctctctctattattgtgcatgccgaaattttccataataattttcaaaaattaaatgc

SEQ ID NO: 72899 - DNA, 110 bp, synthetic construct
  source 1..110: mol_type = other DNA
aacaagggcttccacatgccaggtaccaagcctagggtttctgggccttatctcataaggcgaccaccctacatgataggcttccctgttatgtccatttttcagatgag

SEQ ID NO: 72900 - DNA, 110 bp, synthetic construct
  source 1..110: mol_type = other DNA
ctttttataaaaacaaatttaacctgctcacccttcttggcagctaggccaggtctctgccattttgcaaagtaatgatgagaaaatatttgtttgttttgctgtttgta

SEQ ID NO: 72901 - DNA, 110 bp, synthetic construct
  source 1..110: mol_type = other DNA
aggccaggtctctgccattttgcaaagtaatgatgagaaaatatttgtttgttttgctgtttgtaactcatcattgaacctgggacctattaataaatttaaatttgtga

SEQ ID NO: 72902 - DNA, 110 bp, synthetic construct
  source 1..110: mol_type = other DNA
ctcttaaaactggaccagtatggttgagtagtcagctcatgtagaagcatcagggaagctcaggtttgaatctgaggatggggtcgagccaaaaggagtctgagtaattt

SEQ ID NO: 72903 - DNA, 110 bp, synthetic construct
  source 1..110: mol_type = other DNA
aagctcaggtttgaatctgaggatggggtcgagccaaaaggagtctgagtaatttgtacttgatctaatagaaaatcattgaagttacgggagcaagggagtaatatggg

SEQ ID NO: 72904 - DNA, 110 bp, synthetic construct; identical to SEQ ID NO: 72902
  source 1..110: mol_type = other DNA

SEQ ID NO: 72905 - DNA, 110 bp, synthetic construct; identical to SEQ ID NO: 72903
  source 1..110: mol_type = other DNA

SEQ ID NO: 72906 - DNA, 110 bp, synthetic construct
  source 1..110: mol_type = other DNA
aacgcatcacctcacaggcatgtcttgctaggtggcaggttcctttcagcggagggcagttctcaggggaagggtcacctattaggtgttaatggccaggactcacagca

SEQ ID NO: 72907 - DNA, 110 bp, synthetic construct
  source 1..110: mol_type = other DNA
gcagttctcaggggaagggtcacctattaggtgttaatggccaggactcacagcagctggagtttgggtgcactagcttggtaaaagcagtctggggggccccaccagtg

SEQ ID NO: 72908 - DNA, 110 bp, synthetic construct; identical to SEQ ID NO: 72906
  source 1..110: mol_type = other DNA

SEQ ID NO: 72909 - DNA, 110 bp, synthetic construct; identical to SEQ ID NO: 72907
  source 1..110: mol_type = other DNA

SEQ ID NO: 72910 - DNA, 110 bp, synthetic construct
  source 1..110: mol_type = other DNA
ccagttgtcttagaaagtgattgcctagtgtagagctaaggtgggaaacacatctgtcctgtgtgacgattttcttctctaaaatgagtaggttcaaagaatcggggctt

SEQ ID NO: 72911 - DNA, 110 bp, synthetic construct
  source 1..110: mol_type = other DNA
aatattttgaacaacaggactgctgcctttctccaccctggagagcctggggaggctaccatcacttatagcatacatggagaggtatattagagtagcctcggggtctc

SEQ ID NO: 72912 - DNA, 110 bp, synthetic construct
  source 1..110: mol_type = other DNA
tctcccactagcttggtttctgtgccatatcttgtgcattattcagtgcttggattttccagttttgtatcttttaatctgacttctgtctgtgcttatatatcatcaag

SEQ ID NO: 72913 - DNA, 110 bp, synthetic construct
  source 1..110: mol_type = other DNA
catctctctgtctgtatgtagccctattcatagttcttttggtgcatcagctacagggtaaccatgcttatatggtggcccagggcttcaaagattcatttctaagaaag

SEQ ID NO: 72914 - DNA, 110 bp, synthetic construct
  source 1..110: mol_type = other DNA
atttatagcaaattctcatcagagggcagttcaattccatgttgcagctaatctagtctgtaatgcaagcacctctcctaggacttctttgacctgatgtatccaatggt

SEQ ID NO: 72915 - DNA, 110 bp, synthetic construct
  source 1..110: mol_type = other DNA
atgcctgagtgaggttttcttttcattgacccagtttgaggcagtggtacctacaggaatttggtcttccaagattggagctctggttactgtaagccttgctcccttct

SEQ ID NO: 72916 - DNA, 110 bp, synthetic construct
  source 1..110: mol_type = other DNA
gctttatgattattttcccaattttttctaacatggaaattatgggtcagagaaaggtcaaataacttgctagttatttacagctagtaggcaatggagaaaggtgtcac

SEQ ID NO: 72917 - DNA, 110 bp, synthetic construct
  source 1..110: mol_type = other DNA
ttttttgtatgttagcaaaattcaaggtgctgatctaaaagaatgctggaccatgagtggctgcttcaattcaagtaaaaattttcagtgttattttccagcatgctttt

SEQ ID NO: 72918 - DNA, 110 bp, synthetic construct
  source 1..110: mol_type = other DNA
ctggaccatgagtggctgcttcaattcaagtaaaaattttcagtgttattttccagcatgctttttaaagcacatttaaagtaagtctttgactatgttattggcctttt

SEQ ID NO: 72919 - DNA, 110 bp, synthetic construct
  source 1..110: mol_type = other DNA
gcaaactctctgccagggtacaatctgcattagatgagtaggtaagctaggtcacagaacaagatactgttggttgatgaggcaaaagtgaaattgcagaaagttttatt

SEQ ID NO: 72920 - DNA, 110 bp, synthetic construct
  source 1..110: mol_type = other DNA
ttcttttcccttcattttgttaccaaatacgctctagcctcttatcctttctgttttaatccttaatgtcttgccaaactaaagagaaaccagctggcacttgtaatggc

SEQ ID NO: 72921 - DNA, 110 bp, synthetic construct
  source 1..110: mol_type = other DNA
ttaatccttaatgtcttgccaaactaaagagaaaccagctggcacttgtaatggcattgattgtaatgttaaaatttctctgctttaactaaatctgcagttgcttaaga

SEQ ID NO: 72922 - DNA, 110 bp, synthetic construct
  source 1..110: mol_type = other DNA
ggttcaatgtataaggagaccacacaagactgtgattatcataaggaccatggagagccatcatgggaacttcacgggaaagaagttttgtgagagtgagtccttgggta

SEQ ID NO: 72923 - DNA, 110 bp, synthetic construct
  source 1..110: mol_type = other DNA
aatactcaataaatgatggttattaacatcatcatcatcattatcgtctaataaaagaatcagttttgattacagaattaagctcaccatagattccctccccattcctt

SEQ ID NO: 72924 - DNA, 110 bp, synthetic construct
  source 1..110: mol_type = other DNA
agaatcagttttgattacagaattaagctcaccatagattccctccccattccttttgtgggccattttggcaaattttcttctctgaggggcttcaaaggcaagttctt

SEQ ID NO: 72925 - DNA, 110 bp, synthetic construct
  source 1..110: mol_type = other DNA
acttagatttctggcaacttgagcttcataaaatctgctagctctatgaagtatatttatatttacgtatatacatatattcacccaacagaggaggaaaacattagtga

SEQ ID NO: 72926 - DNA, 110 bp, synthetic construct
  source 1..110: mol_type = other DNA
gaatctgagtctgtgcagtgtttaccaagagataattacccaatgctatttgttttccattagtcaagtgtggcaatgtttatttgcaccattcctttaagctctaccaa

SEQ ID NO: 72927 - DNA, 110 bp, synthetic construct
  source 1..110: mol_type = other DNA
tccattagtcaagtgtggcaatgtttatttgcaccattcctttaagctctaccaatttagacctctaaaacattgtaatagttgctactgggtgaggtgaaaatcatttt

SEQ ID NO: 72928 - DNA, 110 bp, synthetic construct
  source 1..110: mol_type = other DNA
tctctttgaatggtggctgcagttgttccttaccagctctctccagtggataaaatggtttggggctacaattgactagctttgggatgggagattctgtatgaaatgat

SEQ ID NO: 72929 - DNA, 110 bp, synthetic construct
  source 1..110: mol_type = other DNA
tggtttggggctacaattgactagctttgggatgggagattctgtatgaaatgatatagtcataatatgtgtattaatttcacacctattggcacagcagtagtctgtat

SEQ ID NO: 72930 - DNA, 110 bp, synthetic construct
  source 1..110: mol_type = other DNA
aaagcagtggttgttaagaatgtgggttagacaaacagccattttggtttcagtcatttctgtctgagaattggcaatataacataaaaaatgaatattttacattccag

SEQ ID NO: 72931 - DNA, 110 bp, synthetic construct
  source 1..110: mol_type = other DNA
cagccattttggtttcagtcatttctgtctgagaattggcaatataacataaaaaatgaatattttacattccagttatgagacatgcaaagatcattttgaaagtttgc

SEQ ID NO: 72932 - DNA, 110 bp, synthetic construct
  source 1..110: mol_type = other DNA
ttattttatttttattttttgcttttcagggccacacctacagcatttggacgttcccagactaaggatccaactggaactacagctgccagccaatgccacagccacag

SEQ ID NO: 72933 - DNA, 110 bp, synthetic construct
  source 1..110: mol_type = other DNA
tttttgcttttcagggccacacctacagcatttggacgttcccagactaaggatccaactggaactacagctgccagccaatgccacagccacagcaacttggaatccaa

SEQ ID NO: 72934 - DNA, 110 bp, synthetic construct
  source 1..110: mol_type = other DNA
gtatcagaatgcggacacaaatcttggggagggaaccatctgaaagattctctggtctttgctcaaaggatgatcaagctttgatcatctttcccaggcagcattgcagg

SEQ ID NO: 72935 - DNA, 110 bp, synthetic construct
  source 1..110: mol_type = other DNA
tctttgctcaaaggatgatcaagctttgatcatctttcccaggcagcattgcaggaaggaacctgtggaaacagataggttggccttatttctttcctcatcttagtgtt

SEQ ID NO: 72936 - DNA, 110 bp, synthetic construct
  source 1..110: mol_type = other DNA
tcttgggtgggctccagataaaaggtagaaactaagaaaaatgagattaagatggtggtaaggaaggactagagctcatcttctctcctaaaaacaatgaaattgcaact

SEQ ID NO: 72937 - DNA, 110 bp, synthetic construct
  source 1..110: mol_type = other DNA
cacaatttttatatgtcatcatttacctgattggattctccatttcctcctagcctacactcactccccacagaaacacatgttaatttacaaaagtaattccattacga

SEQ ID NO: 72938 - DNA, 110 bp, synthetic construct
  source 1..110: mol_type = other DNA
tgttttctgtcaaaacttgtaatttcaggaaggccagagattccctgatatctttcaaggtctctaactatccctattgtagagaatagcaaattaaggaaactgacttc

SEQ ID NO: 72939 - DNA, 110 bp, synthetic construct
  source 1..110: mol_type = other DNA
gcaacaaaggatcccaaacccactgagcgaggctagagattgaacctgcaacctcatggtcattagtcagatttgtttcaattggaccacaacgggaactccgtgtttat

SEQ ID NO: 72940 - DNA, 110 bp, synthetic construct; identical to SEQ ID NO: 72939
  source 1..110: mol_type = other DNA

SEQ ID NO: 72941 - DNA, 110 bp, synthetic construct
  source 1..110: mol_type = other DNA
agttgatgtgctgaggtactttggttcccccatgctctgaggcgtaacactggtttccagtttccccaagaacaaagcttagatcactctcattggaatgtggcaacaga

SEQ ID NO: 72942 - DNA, 110 bp, synthetic construct
  source 1..110: mol_type = other DNA
tccagtttccccaagaacaaagcttagatcactctcattggaatgtggcaacagaatgtacccttttggatgacattccttccttgcctttcttttctgatgcttgcttt

SEQ ID NO: 72943 - DNA, 110 bp, synthetic construct
  source 1..110: mol_type = other DNA
aatatggttcagtggtgcagaagatgtttctgaaatgtttttaagtgtctgtttattgaaatcatgtatgtcaagttctggcatggaccacttaatcccttatctcattt

SEQ ID NO: 72944 - DNA, 110 bp, synthetic construct
  source 1..110: mol_type = other DNA
ctcattgcattttccaattttccattcacttgagaagctcctgtcacacttccgattgtgtttcctcagcttctgtttggatgaattcaggggcagagacccaaattctg

SEQ ID NO: 72945 - DNA, 110 bp, synthetic construct
  source 1..110: mol_type = other DNA
agaagagggagatggacttcacctcttgatggaagaatgttgacagtgttcattaaaggaagatattgtaaagctagaaaatatatttattttaatttccttctatgaaa

SEQ ID NO: 72946 - DNA, 110 bp, synthetic construct; identical to SEQ ID NO: 72945
  source 1..110: mol_type = other DNA

SEQ ID NO: 72947 - DNA, 110 bp, synthetic construct
  source 1..110: mol_type = other DNA
ctgtcactagatccttctgaatgcaggcaataaaatggtaatggagttgactttgctttacctttcaaatgactcagtttctgatagtaagatataattttatatcatga

SEQ ID NO: 72948 - DNA, 110 bp, synthetic construct
  source 1..110: mol_type = other DNA
atatgtgctgcaaatacaaggggagagtgatggtggtagcagcagagctggggtgtccacgtgaaggagatgatccacaccagtgcttttctctgcaggaccctggagcc

SEQ ID NO: 72949 - DNA, 110 bp, synthetic construct
  source 1..110: mol_type = other DNA
tttgagctccaaaggataaatagaagttaggagatgacaggaatgagtataacgtgatgaatgaaggctcagtgaggagaatgtctgattagagtgatgggtacacagtg

SEQ ID NO: 72950 - DNA, 110 bp, synthetic construct
  source 1..110: mol_type = other DNA
tttacactttttcttgctatataacacacagccaaagtttaatcagccacttcattcaacattcatttatgcattcacactccaaacctttgtgcaattatattcaggga

SEQ ID NO: 72951 - DNA, 110 bp, synthetic construct
  source 1..110: mol_type = other DNA
ccataccctctatgttaggccccagactcctcacacttattccataatgcaggagttacatccacagactggtttcctggagagcttgctctgccccatggtcaaatgtc

SEQ ID NO: 72952 - DNA, 110 bp, synthetic construct
  source 1..110: mol_type = other DNA
ttacatccacagactggtttcctggagagcttgctctgccccatggtcaaatgtccaatcacaatcattctccttcagataaaagttttgagtaaagggtaaatctccct

SEQ ID NO: 72953 - DNA, 110 bp, synthetic construct
  source 1..110: mol_type = other DNA
ctcttgctggtggaatgctgctgcatttaaactgatgttagcttatataaacccatgtatattataatatgcctcagtttatctattaacacaagggagtgtatttcaag

SEQ ID NO: 72954 - DNA, 110 bp, synthetic construct
  source 1..110: mol_type = other DNA
tgaaccatagttctgtttctctgtataaatctttgccaagctttatgtgccggattttgttacaacttaaccacctatctttagtctgtcattttttatatctcccatcc

SEQ ID NO: 72955 - DNA, 110 bp, synthetic construct
  source 1..110: mol_type = other DNA
cctttataggaaatggcacactacagtagaccctctgtatatgcaagttcaagtgcagcaatcattgaagtcgaccaacagtggactgaaactgggtggtggtgttgatc

SEQ ID NO: 72956 - DNA, 110 bp, synthetic construct
  source 1..110: mol_type = other DNA
cagcaatcattgaagtcgaccaacagtggactgaaactgggtggtggtgttgatctggagcctgcagatagagggctgactgtatttagtgcctgcacatttgttaataa

SEQ ID NO: 72957 - DNA, 110 bp, synthetic construct
  source 1..110: mol_type = other DNA
aaataaacaccatcctcatcctcctggaggtctgcaatggcagtagtagatgacgagcagggtctgacatctgcgttcatcacaaaatcctgagcaaattgtctgtaatc

SEQ ID NO: 72958 - DNA, 110 bp, synthetic construct
  source 1..110: mol_type = other DNA
aactgctggatctctacttttgcaaggatccctggttgatgtttacatatgtacaactagcctctaaaatgctgatgcagagtgcgatcattttttgattggatctgggg

SEQ ID NO: 72959 - DNA, 110 bp, synthetic construct
  source 1..110: mol_type = other DNA
actagcctctaaaatgctgatgcagagtgcgatcattttttgattggatctggggggctaagaatagtaaaactacagttaaggcgtgctaacttttttagaccctgaaa

SEQ ID NO: 72960 - DNA, 110 bp, synthetic construct; identical to SEQ ID NO: 72958
  source 1..110: mol_type = other DNA

SEQ ID NO: 72961 - DNA, 110 bp, synthetic construct; identical to SEQ ID NO: 72959
  source 1..110: mol_type = other DNA

SEQ ID NO: 72962 - DNA, 110 bp, synthetic construct
  source 1..110: mol_type = other DNA
tcatgatagggtgcattctctgatgaccccaaaatcttataataaaagcttatttcttacttaagcacagtccaatacatgacgggtggttctcctccaactcatgactc

SEQ ID NO: 72963 - DNA, 110 bp, synthetic construct
  source 1..110: mol_type = other DNA
cttacttaagcacagtccaatacatgacgggtggttctcctccaactcatgactcagggatccaggttcactacctattgtacctctgccaccccaacatccggccttca

SEQ ID NO: 72964 - DNA, 110 bp, synthetic construct
  source 1..110: mol_type = other DNA
agccagttgccctggaaatggtggcccctacacagtgtcacccagggctctgcattttgtcattttctgtttgctatttagaaagaaacctagcttgtagctgggatgtg

SEQ ID NO: 72965 - DNA, 110 bp, synthetic construct
  source 1..110: mol_type = other DNA
tttgtcattttctgtttgctatttagaaagaaacctagcttgtagctgggatgtgcgataaccatcatgccacaagactgccagacacagctgagcccctgcacagaaag

SEQ ID NO: 72966 - DNA, 110 bp, synthetic construct
  source 1..110: mol_type = other DNA
gagatggaaagccaggccttactagtgtgtggccctgggcaggttattcgaccccccctgggaggtgctggtgggagagagagggagcaggcgtgagaacacgacagaga

SEQ ID NO: 72967 - DNA, 110 bp, synthetic construct
  source 1..110: mol_type = other DNA
ccctgggaggtgctggtgggagagagagggagcaggcgtgagaacacgacagagagaaatccgcagcatggctttggaaaacacacccctcagtccaaaagcacacggaa

SEQ ID NO: 72968 - DNA, 110 bp, synthetic construct
  source 1..110: mol_type = other DNA
tgatgaatgactcgtaaacactcagagccttggggaccctggggccaagggctgcagctgttcatctaaccatggaaaagaaaggacaaaattttaaaataggaagggag

SEQ ID NO: 72969 - DNA, 110 bp, synthetic construct
  source 1..110: mol_type = other DNA
tggtccaaagtagacccactaaccctcaataacagaatgcaaatttctcatggcttaacgtgagctcagagacaggtgaaggaaagtttccttttatcagtaccaatgta

SEQ ID NO: 72970 - DNA, 110 bp, synthetic construct
  source 1..110: mol_type = other DNA
gcagagttctttccaacatggaactgatcctgcctccaaaccaagacccattttggctctcttgggcacacagaacaaggctccacagctaactaacaggcaggccttca

SEQ ID NO: 72971 - DNA, 110 bp, synthetic construct
  source 1..110: mol_type = other DNA
caaattacatgccaccacaggacttccctcctaccctgaggacgtttctatgcaataatagtcaaagttcaataaagatctgtgattccaattaatcagcaatagaaata

SEQ ID NO: 72972 - DNA, 110 bp, synthetic construct
  source 1..110: mol_type = other DNA
cccagtgtgcctgaatctgcagggagacacacggagaaccttgcttcctttcacatgacctagcacaggcctgagtgctggagaccagctcaaaggacaaccaagagatg

SEQ ID NO: 72973 - DNA, 110 bp, synthetic construct
  source 1..110: mol_type = other DNA
agagtcagcaggatccacagagatgccacaactggccaactcgtgatcctcagcaatggggacaggacaccagctcagggcctggaaacaccaggtgagtgccaggaatg

SEQ ID NO: 72974 - DNA, 110 bp, synthetic construct
  source 1..110: mol_type = other DNA
atggggacaggacaccagctcagggcctggaaacaccaggtgagtgccaggaatgcgtgaaggtaggcactgccaaccattttggcccccacagcctctctcctcggcca

SEQ ID NO: 72975 - DNA, 110 bp, synthetic construct
  source 1..110: mol_type = other DNA
ttgtcaccctgattgctctatatctctgtgtataattcagagtctgtgttgcagagatactatgatgtaccttaggttaatatataaaaagtcaaatttgcataaatcca

SEQ ID NO: 72976 - DNA, 110 bp, synthetic construct
  source 1..110: mol_type = other DNA
caggatggagagaagaaaatttgaagtcactcacggagctcttaaaagtatccaggtttggagtgagaaggactgaactaattggtagcagctgaaaaatcaagacattg

SEQ ID NO: 72977 - DNA, 110 bp, synthetic construct
  source 1..110: mol_type = other DNA
tatgccaaccctcatttctataggctagccagagagccttaagggtcattcctttccccgttaccagcttgcttccttcatttatttattcatgaatgggctaatttctg

SEQ ID NO: 72978 - DNA, 110 bp, synthetic construct
  source 1..110: mol_type = other DNA
gataagattccagaaaaccaatacagaacctgctgcatatatgttagtaatgggagctgctttttatgaggaatagagggtagtagctaagtcaccaacttggagccaga

SEQ ID NO: 72979 - DNA, 110 bp, synthetic construct
  source 1..110: mol_type = other DNA
ttcaagttttgagttgctgtctttggatttgaaagagcagctccttcttctagcttttactaaatgcactttttagtgcatccaaacttgtatttttttgcttcagtgtt

SEQ ID NO: 72980 - DNA, 110 bp, synthetic construct
  source 1..110: mol_type = other DNA
tcaccttggtctccctccaagggacaaggtgctcaaatcagggagcagtgagcctgttttgctcagacccagctggggtgtaggctttccagatgggcctctcactttgg

SEQ ID NO: 72981 - DNA, 110 bp, synthetic construct
  source 1..110: mol_type = other DNA
aaaacgggtaaaattcctagtaagaacttgcttctaatagccattactttgttctcgctattacctttctatgtggtgatttctccatatttattttgcctacccaaacc

SEQ ID NO: 72982 - DNA, 110 bp, synthetic construct
  source 1..110: mol_type = other DNA
cgctattacctttctatgtggtgatttctccatatttattttgcctacccaaacctgctcacaggataatatcttgtagtggttgcatgcaccttcattactactatttt

SEQ ID NO: 72983 - DNA, 110 bp, synthetic construct
  source 1..110: mol_type = other DNA
atagattgcagatgtggctcagatccagtgttgctgtggctgtggctgcagctgtagttctgattcaacctctcactcagggatttacatatgtcacaggtacagccata

SEQ ID NO: 72984 - DNA, 110 bp, synthetic construct
  source 1..110: mol_type = other DNA
gacaaatgttaattgttttcaccaatactttctaacaatgcagaggtcttttcgtctcttacccagggctcactgtcgttttctaaagcttatccagtgtctaaaaccct

SEQ ID NO: 72985 - DNA, 110 bp, synthetic construct
  source 1..110: mol_type = other DNA
tttaacacctttctaggatgggctaatctctctttgtaggagagagagagcatttagtcttttgcctttggaggcaatagtgtttagcttagaatttaaataaaatagaa

SEQ ID NO: 72986 - DNA, 110 bp, synthetic construct
  source 1..110: mol_type = other DNA
caacctacgctatagctcatggcaatgctggatctttaaacttctgaggccagacattgaacttgaatactcatgaatacatgtaacctgctgaggcacaatgggaactc

SEQ ID NO: 72987 - DNA, 110 bp, synthetic construct
  source 1..110: mol_type = other DNA
tcatgcctgatgggctgttacctgacttcctacccagttcacccatagctccatcaaagacacatgtgacgtgctggcactccttagtgggcatttatttgggttctgca

SEQ ID NO: 72988 - DNA, 110 bp, synthetic construct
  source 1..110: mol_type = other DNA
aggtggagtggaaggaattctacatgtgttaaacgaacaagctaaactcatgtaaattcagaaagcaaattcattttttagtaacaactttcttggggatataattggca

SEQ ID NO: 72989 - DNA, 110 bp, synthetic construct
  source 1..110: mol_type = other DNA
gttgggagccatgtctgagggagaggcttctagaggcaagagcccagatatctctcagtcaccccagctgagctcttagcagcttcatggtgctttcaagtagagttagt

SEQ ID NO: 72990 - DNA, 110 bp, synthetic construct
  source 1..110: mol_type = other DNA
ccaccacatgccaagcatcaaaagaacagctctgtccatgaaaatcatagcaccgggaggagggaaatcaaacccaaaattaatcaaacaggatgtaattcccagagcaa

SEQ ID NO: 72991 - DNA, 110 bp, synthetic construct
  source 1..110: mol_type = other DNA
ctactgatgtcactgttacttggacattggtgagattttcaactcttggtcaatcaggtatttcctaccccaaaaaaccagactaagaggcctagcccagatttgatttt

SEQ ID NO: 72992 - DNA, 110 bp, synthetic construct
  source 1..110: mol_type = other DNA
aggtatttcctaccccaaaaaaccagactaagaggcctagcccagatttgatttttacctactctcttcccataaataagacccatataaataaccatccaagatggaag

SEQ ID NO: 72993 - DNA, 110 bp, synthetic construct
  source 1..110: mol_type = other DNA
gaggagcttctgcaggcccagcccagcaaggcttgcatgtcagcgcgcagggtcagaaagcactcgctctgctcttcataaatggtatgattgaaagcaggctgctgccg

SEQ ID NO: 72994 - DNA, 110 bp, synthetic construct
  source 1..110: mol_type = other DNA
gaaagcactcgctctgctcttcataaatggtatgattgaaagcaggctgctgccgtggttgtaggggttttttttccctgatattttcttgaaataacaaatgtgcataa

SEQ ID NO: 72995 - DNA, 110 bp, synthetic construct
  source 1..110: mol_type = other DNA
cccactccaacagctcagcaactgaccaacagccaaggtcatgcaggtggcagtgtggcaggatttcttctgggccatgacattgacatgcaggatgaagaagagaaagg

SEQ ID NO: 72996 - DNA, 110 bp, synthetic construct
  source 1..110: mol_type = other DNA
ccctgtctcgccctgggaggaattttattaccttatagaagcagtctgttgcatgaaggagaaaagttgaataagggtatctggtaaatgagatgttctcagtcaagagg

SEQ ID NO: 72997 - DNA, 110 bp, synthetic construct
  source 1..110: mol_type = other DNA
aaggagaaaagttgaataagggtatctggtaaatgagatgttctcagtcaagaggcaattaaccggcaaacagacgtgccgcgaggcaggtgtgcggaaagatacagaga

SEQ ID NO: 72998 - DNA, 110 bp, synthetic construct
  source 1..110: mol_type = other DNA
ggacttgtggaagagcagagccccatctcccatgtcacatgtgctgggttttatccgcttgcccctgtagctccattctccacgcttccctgcccttctctgtagcctga

SEQ ID NO: 72999 - DNA, 110 bp, synthetic construct
  source 1..110: mol_type = other DNA
cgcttgcccctgtagctccattctccacgcttccctgcccttctctgtagcctgaacagtttacttccctggacattatctccaggctcctttgccctctggcttccaat

SEQ ID NO: 73000 - DNA, 110 bp, synthetic construct
  source 1..110: mol_type = other DNA
gttgcttgaggcatcattttttggcttcccttgatggattttttttgagcagcatcgtagaggaattcaagaagcgcctggcgttccactgagctggattcagacctggc

SEQ ID NO: 73001 - DNA, 110 bp, synthetic construct
  source 1..110: mol_type = other DNA
cgtagaggaattcaagaagcgcctggcgttccactgagctggattcagacctggctcacttaccagctgagtcagcttgcctgagtttcccagcctctctgagctttatt

SEQ ID NO: 73002 - DNA, 110 bp, synthetic construct; identical to SEQ ID NO: 73000
  source 1..110: mol_type = other DNA

SEQ ID NO: 73003 - DNA, 110 bp, synthetic construct; identical to SEQ ID NO: 73001
  source 1..110: mol_type = other DNA

SEQ ID NO: 73004 - DNA, 110 bp, synthetic construct
  source 1..110: mol_type = other DNA
tttctcagcctccatccttgctgaggcttatacgaatttgatagtgttcatgtgttttatacatagaatagatgcaaggggatctactcttactgcagcaggggaggggc

SEQ ID NO: 73005 - DNA, 110 bp, synthetic construct
  source 1..110: mol_type = other DNA
tttatacatagaatagatgcaaggggatctactcttactgcagcaggggaggggccctgacccagcctcccttgtctctaccctctccctgcaatactccctgaagtgcc

SEQ ID NO: 73006 - DNA, 110 bp, synthetic construct
  source 1..110: mol_type = other DNA
tgaaatctcctttctcactgtacttacttgccaaataggtaatggagaagagagcagaaaattaatagataaacaaaaagacaaatcagaatgaggggtccagaaaaatg

SEQ ID NO: 73007 - DNA, 110 bp, synthetic construct
  source 1..110: mol_type = other DNA
catgcaatcaacatacattaaccaaataccaccagggtcacagaggtaagtcagcatccctgccctcaaggagctcacagtctaatggggagacgcataagataaaccag

SEQ ID NO: 73008 - DNA, 110 bp, synthetic construct
  source 1..110: mol_type = other DNA
aaaaaatcctccaggtttccaaacaataggacaatttgaaatattggtatttatgaagctcttttaatcaaggcaccattgatatgtcattgggctcttctcctgcttaa

SEQ ID NO: 73009 - DNA, 110 bp, synthetic construct
  source 1..110: mol_type = other DNA
ctgcaagtagggggtatgtgtggctgtgggacagggcccaagggtcctacagagactcacctggaatgggggccgtgaccgccggctggatggggtaggcctgctgcacg

SEQ ID NO: 73010 - DNA, 110 bp, synthetic construct
  source 1..110: mol_type = other DNA
ctcacctggaatgggggccgtgaccgccggctggatggggtaggcctgctgcacgaagggcttgacgctggagataggatggagagagtcaaaaaccacggaggagtggc

SEQ ID NO: 73011 - DNA, 110 bp, synthetic construct
  source 1..110: mol_type = other DNA
atcaaagctgtagttgctagcctactctacagttatagcaacactggaactgagcagcacctgtgaaccacaatgcagcttgaagcaatgccagatacttaaaccactga

SEQ ID NO: 73012 - DNA, 110 bp, synthetic construct
  source 1..110: mol_type = other DNA
tggctgagccctgtaccttgccctgctcatgctgaatcaccctcttccaggttgagtcctatgtcctctggctgattcctgtcctcccatgactgcttggtgatgagtgc

SEQ ID NO: 73013 - DNA, 110 bp, synthetic construct
  source 1..110: mol_type = other DNA
gtcctatgtcctctggctgattcctgtcctcccatgactgcttggtgatgagtgctccttaaattccactcaagtcaaagactaggacgttatctcaaggaggaaatgct

SEQ ID NO: 73014 - DNA, 110 bp, synthetic construct
  source 1..110: mol_type = other DNA
gactccagcagctgcttcccactgagggttatggccttgggctaagttctccagatccctccctctgagtaatgcattttgccggtagctctgtgctccctgccttgagc

SEQ ID NO: 73015 - DNA, 110 bp, synthetic construct
  source 1..110: mol_type = other DNA
tccctccctctgagtaatgcattttgccggtagctctgtgctccctgccttgagctgccttggcttcttgtcctgtctggtttgggtgttggggatgcaaacaaaaggaa

SEQ ID NO: 73016 - DNA, 110 bp, synthetic construct
  source 1..110: mol_type = other DNA
tactcccagaaagcaccaacatcactttccccagagcactggtatatgggacttgagcagctttcctgcctttgtagtctttttgctttttagggccgcacccatggcat

SEQ ID NO: 73017 - DNA, 110 bp, synthetic construct
  source 1..110: mol_type = other DNA
cgatctgggccagaagcagcctccctctggctccttctggtcaaagtgccaatagcagattagagagctagagcgcttgcctctgccctccccttttggcctcatccttg

SEQ ID NO: 73018 - DNA, 110 bp, synthetic construct
  source 1..110: mol_type = other DNA
ccccacttcctccatgcatccttcaggcactgtctcacctgtcacaagactcaccatgtcctatagtccctcttaccagctgtatgcatgctcttggtcccctgcctaac

SEQ ID NO: 73019 - DNA, 110 bp, synthetic construct
  source 1..110: mol_type = other DNA
gatgctgggagctttacccatacaagtcataggccactcatgaaagagatgacaagaagggagagtgggtcaattctactagcacacagcagcggctattatcttggggt

SEQ ID NO: 73020 - DNA, 110 bp, synthetic construct
  source 1..110: mol_type = other DNA
gtgaacaaagaaagcctgatttttcataggtttcagagtttccacttgctatagtagctattgtttattgagcatcagctacatagtggtttgtttgtttgttttgtttt

SEQ ID NO: 73021 - DNA, 110 bp, synthetic construct
  source 1..110: mol_type = other DNA
taataacccttatgcagccccagggctgtaatgactgttctccatgccacagtagggaaagggaaggttgtgttttttttaagtaacaaaatccaaaagctattataaat

SEQ ID NO: 73022 - DNA, 110 bp, synthetic construct
  source 1..110: mol_type = other DNA
ggaaagggaaggttgtgttttttttaagtaacaaaatccaaaagctattataaattgtagactctccatagttcctgttgtgggtcatcaggttaagaacccggcatggt

SEQ ID NO: 73023 - DNA, 110 bp, synthetic construct
  source 1..110: mol_type = other DNA
ctctagtttttggtggggagagaagggtgttaattttgggtaatgaaaagtacaaaataaaacaatgtaaatgatgatgactgagggtgctctaagtagcatattttatt

SEQ ID NO: 73024 - DNA, 110 bp, synthetic construct
  source 1..110: mol_type = other DNA
gggagagaagggtgttaattttgggtaatgaaaagtacaaaataaaacaatgtaaatgatgatgactgagggtgctctaagtagcatattttattctgatatacttttta

SEQ ID NO: 73025 - DNA, 110 bp, synthetic construct
  source 1..110: mol_type = other DNA
caagtgggtggattcttagtgtttatcatgctgagagtttcatgcggtgccatggcctgtgactgctatgtggttatctgcaaacccctgctctacttggtggtggtttc

SEQ ID NO: 73026 - DNA, 110 bp, synthetic construct
  source 1..110: mol_type = other DNA
cctgtgactgctatgtggttatctgcaaacccctgctctacttggtggtggtttccccacagatctgccttctcctggtgtctctttttcacctctacagtctcttctgt

SEQ ID NO: 73027 - DNA, 110 bp, synthetic construct; identical to SEQ ID NO: 73025
  source 1..110: mol_type = other DNA

SEQ ID NO: 73028 - DNA, 110 bp, synthetic construct
  source 1..110: mol_type = other DNA
ggtgccatggcctgtgactgctatgtggttatctgcaaacccctgctctacttggtggtggtttccccacagatctgccttctcctggtgtctctttttcacctctacag

SEQ ID NO: 73029 - DNA, 110 bp, synthetic construct
  source 1..110: mol_type = other DNA
ccattttccctaggggaccgaagatgattttgaaaacagcacagatagttcagaattttgcagggggattcctgagctgacaaagacctgcagatttcctagggagcaga

SEQ ID NO: 73030 - DNA, 110 bp, synthetic construct
  source 1..110: mol_type = other DNA
acagcacagatagttcagaattttgcagggggattcctgagctgacaaagacctgcagatttcctagggagcagagaaagttatttctgaagcagcatggaggggtgaga

SEQ ID NO: 73031 - DNA, 110 bp, synthetic construct
  source 1..110: mol_type = other DNA
ttgatgaacctaagtatgattttctctgtatttatactggttagggttacagagcattttgagttcgtggattttttttcttcaactatagagtatggtttcttacattt

SEQ ID NO: 73032 - DNA, 110 bp, synthetic construct
  source 1..110: mol_type = other DNA
attttgagttcgtggattttttttcttcaactatagagtatggtttcttacatttatctctctttctacctcttaattcttctgctttctgtgctttagtctggatattt

SEQ ID NO: 73033 - DNA, 110 bp, synthetic construct
  source 1..110: mol_type = other DNA
ggtaagcttgacctaatcacatgaagcccattaaaaggagttttctccagctgctgcagaaggggagtctgagattgcagcttgagaaggatttgacctgcttcttctgc

SEQ ID NO: 73034 - DNA, 110 bp, synthetic construct
  source 1..110: mol_type = other DNA
ctcctcctgatctcctatatcctcatatttctcactgtgctccacatgaactcacttgagggcagaaataaagctctagccacctgctcttctcacctcagtgtggtgag

SEQ ID NO: 73035 - DNA, 110 bp, synthetic construct
  source 1..110: mol_type = other DNA
gaggaggggaaatgggcttcttggactgttatggtccttctctgtcggcagggggcagcaaccaccagaaagctggcaaagttggatcatggtgttactgtattgtcctg

SEQ ID NO: 73036 - DNA, 110 bp, synthetic construct
  source 1..110: mol_type = other DNA
cagcaaccaccagaaagctggcaaagttggatcatggtgttactgtattgtcctggagattcgcctcctggactctgggcagcagagcctgggaacgtggtgcagggtgg

SEQ ID NO: 73037 - DNA, 110 bp, synthetic construct
  source 1..110: mol_type = other DNA
tgtggattcaggaagactttaggccacttacacatgtgtaatattttttggtccattggctttttaaaaatatggatgactgtcacctctttcatcagtgtattctggct

SEQ ID NO: 73038 - DNA, 110 bp, synthetic construct
  source 1..110: mol_type = other DNA
acttacacatgtgtaatattttttggtccattggctttttaaaaatatggatgactgtcacctctttcatcagtgtattctggctgttatacccttgatggtggtgtgtg

SEQ ID NO: 73039 - DNA, 110 bp, synthetic construct
  source 1..110: mol_type = other DNA
cttaaatatctgtctaccctgccaatctgatttttaacactctttctgatctgcccctgcatccagtgaatatttagtgagagtttacaatgtaccaggttctatttata

SEQ ID NO: 73040 - DNA, 110 bp, synthetic construct
  source 1..110: mol_type = other DNA
gtgtaatttcagttttcttaaacgtgtaagactttttgggtgacctagttaacaacctaccaaaaatgtgtattctgttgctatttgatggaatgtacttcatatgtcta

SEQ ID NO: 73041 - DNA, 110 bp, synthetic construct
  source 1..110: mol_type = other DNA
ttgggtgacctagttaacaacctaccaaaaatgtgtattctgttgctatttgatggaatgtacttcatatgtctataagttttgtttggtgtacagaatagttcaagtct

SEQ ID NO: 73042 - DNA, 110 bp, synthetic construct
  source 1..110: mol_type = other DNA
tgggggatcaaaattgccaacataacattggatgtaaactcctgctttttctttcttgatgtatcacatttttttccttttagatgttgtctaaactttatgctgttata

SEQ ID NO: 73043 - DNA, 110 bp, synthetic construct
  source 1..110: mol_type = other DNA
gccaacataacattggatgtaaactcctgctttttctttcttgatgtatcacatttttttccttttagatgttgtctaaactttatgctgttataggtttctatttcatc

SEQ ID NO: 73044 - DNA, 110 bp, synthetic construct
  source 1..110: mol_type = other DNA
agacaatgagtattccaatggctgagatttgtctggcttttacaattgtggactttgttggccaggccagaccaggccagagcctgtgctgccttgctggctcctacagt

SEQ ID NO: 73045 - DNA, 110 bp, synthetic construct
  source 1..110: mol_type = other DNA
tgttggccaggccagaccaggccagagcctgtgctgccttgctggctcctacagtgagtctgtgtgcacaactacttcactcctagaactggacttcagtggatttacac

SEQ ID NO: 73046 - DNA, 110 bp, synthetic construct
  source 1..110: mol_type = other DNA
gatcctcatgcatggggacctgatctggggctcataagtctcactcctataggggagtctctgtggtagttaatttccagtcagtggcctgcccacacagtgtgtatggg

SEQ ID NO: 73047 - DNA, 110 bp, synthetic construct
  source 1..110: mol_type = other DNA
agtctctgtggtagttaatttccagtcagtggcctgcccacacagtgtgtatggggttgcttatatcacataattgcctctcctactgtattgatgtggccacctcttgt

SEQ ID NO: 73048 - DNA, 110 bp, synthetic construct
  source 1..110: mol_type = other DNA
tgaagttggagagaaactgagaagaataaggaataagtgagagaaaaatgaagcatggggtgttggttaaatgcaacttgggtcattgagccaactgtctgctctagaca

SEQ ID NO: 73049 - DNA, 110 bp, synthetic construct
  source 1..110: mol_type = other DNA
tggggtgttggttaaatgcaacttgggtcattgagccaactgtctgctctagacactgccacttgcaaacccagacagagtaagcaccacactataaataaaattgcatc

SEQ ID NO: 73050 - DNA, 110 bp, synthetic construct
  source 1..110: mol_type = other DNA
gtcaagatcattaaaaacaaaaagtctcaaaaataaccataaccaagtacagcctaaggagacactataatcgaaatgatgatgtgaaatggatggtctctggagtagaa

SEQ ID NO: 73051 - DNA, 110 bp, synthetic construct; identical to SEQ ID NO: 73050
  source 1..110: mol_type = other DNA

SEQ ID NO: 73052 - DNA, 110 bp, synthetic construct
  source 1..110: mol_type = other DNA
caaagggactatgtatactgaaaaggacataatataaattgactatttcaaagcttgtagaggaaggctccaatcccctactgtggagccaggaggaggtacaacaatat

SEQ ID NO: 73053 - DNA, 110 bp, synthetic construct
  source 1..110: mol_type = other DNA
tgtagaggaaggctccaatcccctactgtggagccaggaggaggtacaacaatataggaatttaagcaaggaacttatgggtgcccatgttctggctctatcatcctttg

SEQ ID NO: 73054 - DNA, 110 bp, synthetic construct
  source 1..110: mol_type = other DNA
gtaaatttcaaaagctcttatcacaagaagaaatgttcctgtgcgtgctgatggacatacctgaacttattgtggtaatatttttacaatatatacatgtaatacatcat

SEQ ID NO: 73055 - DNA, 110 bp, synthetic construct
  source 1..110: mol_type = other DNA
aaacaagagggatagacctagagggtagtttccttggtaaaataagtcagaaggtgaaatacataaaacagtatgttttcatttgtatgtggaatctagaaaaataaggc

SEQ ID NO: 73056 - DNA, 110 bp, synthetic construct
  source 1..110: mol_type = other DNA
cctcctgtgtgggctaaatgggacaggattcttcctacagtctgcaggtggtaggggaaaatcactgcaattatcactgacactagaggtgggtgtggccttccaccact

SEQ ID NO: 73057 - DNA, 110 bp, synthetic construct; identical to SEQ ID NO: 73056
  source 1..110: mol_type = other DNA

SEQ ID NO: 73058 - DNA, 110 bp, synthetic construct
  source 1..110: mol_type = other DNA
attagatgtcctaaatattttacccccttttctgccagagtccagctccagcagccagggaatttcccaagaggaggcacggcaggctcaggtataacagagatgcacac

SEQ ID NO: 73059 - DNA, 110 bp, synthetic construct
  source 1..110: mol_type = other DNA
ttagcaatgagatggtaattgttgcctttgctctagagatcaatggtagtggtttcatctttgtcaccagctcttgctttcatatattttctactgtgcccaagcttcca

SEQ ID NO: 73060 - DNA, 110 bp, synthetic construct
  source 1..110: mol_type = other DNA
catctttgtcaccagctcttgctttcatatattttctactgtgcccaagcttccaagtggagcagacagaaaaaagccctttctatctttgtgccccacatccttgtggt

SEQ ID NO: 73061 - DNA, 110 bp, synthetic construct
  source 1..110: mol_type = other DNA
ggatgcaattttgatccctggccttcctctttgtgtttaggatccagtgttgtttcaagctgtggggaagttcaccctagcccgggaaatttgatatgccacagggcata

SEQ ID NO: 73062 - DNA, 110 bp, synthetic construct
  source 1..110: mol_type = other DNA
caagctgtggggaagttcaccctagcccgggaaatttgatatgccacagggcataatcaagcaagtaaatttggagttcctgtcatggctcagtgtttaacgaatctgac

SEQ ID NO: 73063 - DNA, 110 bp, synthetic construct
  source 1..110: mol_type = other DNA
tttataagtgtcccgtaattgtgtatctaagttcattagtatggccctcaaactcaaaggaacatacatttgaaatgctagctgcaatgcagctttctgattatgttcat

SEQ ID NO: 73064 - DNA, 110 bp, synthetic construct
  source 1..110: mol_type = other DNA
aaaggaacatacatttgaaatgctagctgcaatgcagctttctgattatgttcatgttcctattttcatgtgaaatggacagcatagaggagtccactgcccacagacag

SEQ ID NO: 73065 - DNA, 110 bp, synthetic construct
  source 1..110: mol_type = other DNA
ggtttctaacagggtttactgtatgcctacaaggatttgtacattcttaggtcactctgacattttaacaagtaactttatagccccaatcagaatttgatatttagcct

SEQ ID NO: 73066 - DNA, 110 bp, synthetic construct
  source 1..110: mol_type = other DNA
cctacaaggatttgtacattcttaggtcactctgacattttaacaagtaactttatagccccaatcagaatttgatatttagcctgagggaatattcttttttttttcac

SEQ ID NO: 73067 - DNA, 110 bp, synthetic construct
  source 1..110: mol_type = other DNA
ggaggggcccaggattggaatggaggactgaaaagtggctccatattcctacatttacagtcacccagggctcctgagcagtgacaaggacaggagccattatggaaatg

SEQ ID NO: 73068 - DNA, 110 bp, synthetic construct; identical to SEQ ID NO: 73067
  source 1..110: mol_type = other DNA

SEQ ID NO: 73069 - DNA, 110 bp, synthetic construct
  source 1..110: mol_type = other DNA
tggcttcgcttcaaattttcagataacctgaaaaacaaaacagaacaagtctagtcaaaacaactaccaccaggagttcctgctgtggattaagaaccccactacagtag

SEQ ID NO: 73070 - DNA, 110 bp, synthetic construct
  source 1..110: mol_type = other DNA
caaaacaactaccaccaggagttcctgctgtggattaagaaccccactacagtagcttgggtcactgcaggggtgaatgtttgactcctagcctggggaagtgggttaaa

SEQ ID NO: 73071 - DNA, 110 bp, synthetic construct; identical to SEQ ID NO: 73069
  source 1..110: mol_type = other DNA

SEQ ID NO: 73072 - DNA, 110 bp, synthetic construct; identical to SEQ ID NO: 73070
  source 1..110: mol_type = other DNA

SEQ ID NO: 73073 - DNA, 110 bp, synthetic construct
  source 1..110: mol_type = other DNA
tgcatgagaagcagagcatcctcaaatccctagagaaggatgtgctggaaggtggaaatctgcataatgttctgaaggagcttaagcagatcataatcaccctcatgaat

SEQ ID NO: 73074 - DNA, 110 bp, synthetic construct
  source 1..110: mol_type = other DNA
aaatctgcataatgttctgaaggagcttaagcagatcataatcaccctcatgaatgcctacagtgtcttccaggccactctggctactaccaccaccaccactcctcctg

SEQ ID NO: 73075 - DNA, 110 bp, synthetic construct
  source 1..110: mol_type = other DNA
tgtacttaatctgctttgcactatgagctcttttttttaggtctttctatttttttctttctttccattttttttagagctgcatccacagcatacagaatttcccaggc

SEQ ID NO: 73076 - DNA, 110 bp, synthetic construct
  source 1..110: mol_type = other DNA
tttaggtctttctatttttttctttctttccattttttttagagctgcatccacagcatacagaatttcccaggctagggtcaaatcagacctgcagctgctggcctatg

SEQ ID NO: 73077 - DNA, 110 bp, synthetic construct
  source 1..110: mol_type = other DNA
ctaatgggaacttggcactggactgtcaggccccaaaaaggagggacatgaaggaacaattaaactgttctagagaagtgattgggagatcaggtgtcactcaactaagt

SEQ ID NO: 73078 - DNA, 110 bp, synthetic construct
  source 1..110: mol_type = other DNA
aacatggggagatggaacaaaaaatcatgccagacccacaagtaaattaattaatctgtctcttctcctaaggaaagacaacaaaagaaatatcagtaagagcagcttaa

SEQ ID NO: 73079 - DNA, 110 bp, synthetic construct
  source 1..110: mol_type = other DNA
ccacccagaaaagggaagctgctcgccagcctgccgcaatctgggcacccctgtcctcctgtggaaagcagcgatctggcccaccctggactgtgccaaactacagtttg

SEQ ID NO: 73080 - DNA, 110 bp, synthetic construct
  source 1..110: mol_type = other DNA
cattttttctaacttgctgtttttgtggtctcttttctacaggctgtggggttgtagttcttctagattctgctgtctgtcccaggtggttgaggttggtccaggggctt

SEQ ID NO: 73081 - DNA, 110 bp, synthetic construct
  source 1..110: mol_type = other DNA
aagataatgagtcaaccagcctgtctgcaataggaagagataaggatttgaccacctaccttgctaattcactgagattcacttctgttttcccctttaaaaactgtcat

SEQ ID NO: 73082 - DNA, 110 bp, synthetic construct
  source 1..110: mol_type = other DNA
ttccaaatatgaaccaaaagagagccacaccaaaacgcattatattaaaatgctgtaaggggaatcatgatcaagatggcagaggagtaagatgtggcattcaatttctc

SEQ ID NO: 73083 - DNA, 110 bp, synthetic construct
  source 1..110: mol_type = other DNA
tgttactgcaaatggcattattttattcctttttatggctcagtaattgtgtgtgtgcatgtgtatattctttatccacttagttgggccctcttgcttttttccttggt

SEQ ID NO: 73084 - DNA, 110 bp, synthetic construct; identical to SEQ ID NO: 73083
  source 1..110: mol_type = other DNA

SEQ ID NO: 73085 - DNA, 110 bp, synthetic construct
  source 1..110: mol_type = other DNA
tattgactttaacaaactatcctatctattgtttgttcccctatgttcattctacatttcttcttcccatagaagcctcttatctctcctatattttctttgtaacatta

SEQ ID NO: 73086 - DNA, 110 bp, synthetic construct
  source 1..110: mol_type = other DNA
agattcaggagtcctcaggctgggaagaggcagcagtctgtcttggtggggacaacgagggttgaatggacaaaagagagaggaagagaagtttctgttatagatatgag

SEQ ID NO: 73087 - DNA, 110 bp, synthetic construct
  source 1..110: mol_type = other DNA
cgagggttgaatggacaaaagagagaggaagagaagtttctgttatagatatgagcccgctcttgtgggaggccaccttgtgcacaaagggctgtggggcatcaaaacac

SEQ ID NO: 73088 - DNA, 110 bp, synthetic construct
  source 1..110: mol_type = other DNA
gagaacagaagatggctggctgtgagctggcagggggctggggcactcgaggatggtccacactgaccttgggatcctcaacataatacaacatgactgcagccaacatt

SEQ ID NO: 73089 - DNA, 110 bp, synthetic construct
  source 1..110: mol_type = other DNA
agccttagttttgtgctctgtagtatgggtctgaaataatgtgagcctcagagggttgtcctacctttaggaccctaaagtctcatctgccagagtcagggtggtggccc

SEQ ID NO: 73090 - DNA, 110 bp, synthetic construct
  source 1..110: mol_type = other DNA
ttgtcctacctttaggaccctaaagtctcatctgccagagtcagggtggtggccccaaatagaaggggtgagtgcccagtcatgggcttgactgatcaggaggcatattc

SEQ ID NO: 73091 - DNA, 110 bp, synthetic construct; identical to SEQ ID NO: 73089
  source 1..110: mol_type = other DNA

SEQ ID NO: 73092 - DNA, 110 bp, synthetic construct; identical to SEQ ID NO: 73090
  source 1..110: mol_type = other DNA

SEQ ID NO: 73093 - DNA, 110 bp, synthetic construct
  source 1..110: mol_type = other DNA
acctcccagctcccctgcatccagccaggtgacagcaggaagtatcctgctggtggcatcagtcagaactcagttctgctactgacatgtataaccttctctgagcctcg

SEQ ID NO: 73094 - DNA, 110 bp, synthetic construct
  source 1..110: mol_type = other DNA
gcatcagtcagaactcagttctgctactgacatgtataaccttctctgagcctcggttcagcttggatgatgtcccacatcttggggagactggggtgggatggagaggc

SEQ ID NO: 73095 - DNA, 110 bp, synthetic construct; identical to SEQ ID NO: 73093
  source 1..110: mol_type = other DNA

SEQ ID NO: 73096 - DNA, 110 bp, synthetic construct; identical to SEQ ID NO: 73094
  source 1..110: mol_type = other DNA

SEQ ID NO: 73097 - DNA, 110 bp, synthetic construct
  source 1..110: mol_type = other DNA
cagggcagacatcagcaatctatcccagaattgtttcccagcttcagcaccctgcttgacacagaggcctgagcagccaccaaaaatctgtccaagttggcatgtgatct

SEQ ID NO: 73098 - DNA, 110 bp, synthetic construct
  source 1..110: mol_type = other DNA
gatggccctttcagctgacatgtaagccccacctggggagaggctagatgtgacaagaagcagctcccaggacagcaagctcacctcacattcagtgagaatgcggctct

SEQ ID NO: 73099 - DNA, 110 bp, synthetic construct
  source 1..110: mol_type = other DNA
tgtagctctgccagcccccacctcatcctgtttcaggctcacagcctttgttctgaagtccttcgcccaggcacgaagcttcgtcttcattgaccctcaggagctggcag

SEQ ID NO: 73100 - DNA, 110 bp, synthetic construct
  source 1..110: mol_type = other DNA
aagtccttcgcccaggcacgaagcttcgtcttcattgaccctcaggagctggcagatgccaagggctggattgttcagcagcagcaggcagatggctccttcccggcagt

SEQ ID NO: 73101 - DNA, 110 bp, synthetic construct
  source 1..110: mol_type = other DNA
ggagttgtaggtgccaacaagtctggcactaaaaggtggcccagtaaaatcttgattccagtaaaaatcaatgtgtgtgtttttttatttgcccctgagtattgccagtc

SEQ ID NO: 73102 - DNA, 110 bp, synthetic construct
  source 1..110: mol_type = other DNA
ttccagtaaaaatcaatgtgtgtgtttttttatttgcccctgagtattgccagtcagaaagcaaccattcagctctctcaaagtctcccctagttggaggtctcatggga

SEQ ID NO: 73103 - DNA, 110 bp, synthetic construct
  source 1..110: mol_type = other DNA
tagattcaaatacttatatggaagttacgtctagtcaaatgtaaagaagagcactttccaaatggcggctgaatgtgacgcatcttttagaaatagaaatgctacatcca

SEQ ID NO: 73104 - DNA, 110 bp, synthetic construct
  source 1..110: mol_type = other DNA
ttccaaatggcggctgaatgtgacgcatcttttagaaatagaaatgctacatccaatcacaaagaactgaagaaatagcacttaataacagatatggaaagtagttggaa

SEQ ID NO: 73105 - DNA, 110 bp, synthetic construct
  source 1..110: mol_type = other DNA
gtgatttaagcatttcagtttggcctgttggcctttctattctgtgacctccagcatagcttgcctggtgatatagttggagtctgtcattgcatcgaggttatttccca

SEQ ID NO: 73106 - DNA, 110 bp, synthetic construct
  source 1..110: mol_type = other DNA
atagcttgcctggtgatatagttggagtctgtcattgcatcgaggttatttcccatatgataggcaaagacaccaaaatccagacactgatgtggccagccctgggtcta

SEQ ID NO: 73107 - DNA, 110 bp, synthetic construct
  source 1..110: mol_type = other DNA
acttgatccatttgagcctctaactcaatcagggtggttaagggtaaaaaaatacatggaagtaacacaaccccggaagccagggtctagtgtgggggggggaggggtgt

SEQ ID NO: 73108 - DNA, 110 bp, synthetic construct
  source 1..110: mol_type = other DNA
ggaaaatgcacagatcaactgagtaacaagtggattccaacatcattattgttatagagcaataggtctcaaacaattttcagtttgaggaccttatttttttctgggtt

SEQ ID NO: 73109 - DNA, 110 bp, synthetic construct
  source 1..110: mol_type = other DNA
agagcaataggtctcaaacaattttcagtttgaggaccttatttttttctgggttcttttaccatggatacactcacagaggcacctttatatattgatatagttttcaa

SEQ ID NO: 73110 - DNA, 110 bp, synthetic construct
  source 1..110: mol_type = other DNA
gtttccacttttcagtgaaaaacaattgggtagtaagaatgacatatcatcctaaacacatcctaaaagttggggaattgtgcgtacatctgctttagcaatgagtacag

SEQ ID NO: 73111 - DNA, 110 bp, synthetic construct
  source 1..110: mol_type = other DNA
acacatcctaaaagttggggaattgtgcgtacatctgctttagcaatgagtacagctgattccaattttcactcaatgcatacatgacttaaaatctacttattgaaaaa

SEQ ID NO: 73112 - DNA, 110 bp, synthetic construct
  source 1..110: mol_type = other DNA
ctgtggtacagtgggtttagaatccagctgtagcaccctgggtctttgcagagatgtgggtttgatccttggcctggcactgggttaaaggctgtggtgttctaacagct

SEQ ID NO: 73113 - DNA, 110 bp, synthetic construct
  source 1..110: mol_type = other DNA
ggtgcattacaattatattccagttcacccacagatccaatgatttcaaaatgtaaagacaaaaatttgataagctgatttaaagaaaaatactacctactaagcttatg

SEQ ID NO: 73114 - DNA, 110 bp, synthetic construct
  source 1..110: mol_type = other DNA
tctcggccaaatctaccatagaatcacaatatgtgtctccttagtacagtgaacctgaaacagacaacattaacagcctgcacccagccagaacccaaaatgtgggactt

SEQ ID NO: 73115 - DNA, 110 bp, synthetic construct
  source 1..110: mol_type = other DNA
ccatagaatcacaatatgtgtctccttagtacagtgaacctgaaacagacaacattaacagcctgcacccagccagaacccaaaatgtgggacttgaacccacattttaa

SEQ ID NO: 73116 - DNA, 110 bp, synthetic construct
  source 1..110: mol_type = other DNA
acatggtcatcatgaatccacgcctctgtggcttgctggtttttatcacttggttcattgcggtcatgacatccctccttcatatcttgctgatgatgcatctgaccttc

SEQ ID NO: 73117 - DNA, 110 bp, synthetic construct
  source 1..110: mol_type = other DNA
cattgcggtcatgacatccctccttcatatcttgctgatgatgcatctgaccttctgcagagatcttgaagttccacatttcttctgtgaactgacacagattctcaggt

SEQ ID NO: 73118 - DNA, 110 bp, synthetic construct
  source 1..110: mol_type = other DNA
aatgatttctgtgatcctgcctatgatctcagccatcctttctacggttggtgccacccacagctccccactgcggtttaccggtaacctccaaagtgaagatcacagta

SEQ ID NO: 73119 - DNA, 110 bp, synthetic construct
  source 1..110: mol_type = other DNA
atctcagccatcctttctacggttggtgccacccacagctccccactgcggtttaccggtaacctccaaagtgaagatcacagtaaccggagatgcttgatggaatggcc

SEQ ID NO: 73120 - DNA, 110 bp, synthetic construct
  source 1..110: mol_type = other DNA
agccaccagcctatactacagccatagcaccaccagagcccgagctacatctttgacctactctacagctcgtggcaacatcggatccttaaacccactcagagaggcca

SEQ ID NO: 73121 - DNA, 110 bp, synthetic construct
  source 1..110: mol_type = other DNA
ctacagccatagcaccaccagagcccgagctacatctttgacctactctacagctcgtggcaacatcggatccttaaacccactcagagaggccagggatccaacccaca

SEQ ID NO: 73122 - DNA, 110 bp, synthetic construct
  source 1..110: mol_type = other DNA
aacactcaaactcccagaaaattctacctttccggttgcacatggacagccatgtacaaagtcttatgtcttgcacatgcccatgtgcgcgtgtgcgtgcacacacacgt

SEQ ID NO: 73123 - DNA, 110 bp, synthetic construct
  source 1..110: mol_type = other DNA
acaaagtcttatgtcttgcacatgcccatgtgcgcgtgtgcgtgcacacacacgtgcctgcggactgggaccttgggataccttcccagcttccaggcataactgttcct

SEQ ID NO: 73124 - DNA, 110 bp, synthetic construct
  source 1..110: mol_type = other DNA
gtggctatggctggaattagtcccctagcctgggaacctccgcgtgcagctactgtggccctaaaaaagcacacacacaaagttgggaagccataggtaagacagcatgg

SEQ ID NO: 73125 - DNA, 110 bp, synthetic construct
  source 1..110: mol_type = other DNA
aggaacttccatatgccccaggtccagcactaaaaagacaataaacagattggtctcaatttatgtataaactagcttttagactgatttattttttcaagtgtatcaat

SEQ ID NO: 73126 - DNA, 110 bp, synthetic construct; identical to SEQ ID NO: 73125
  source 1..110: mol_type = other DNA

SEQ ID NO: 73127 - DNA, 110 bp, synthetic construct
  source 1..110: mol_type = other DNA
aaaaattccatccatactgctcattgtcaagaatgagattctgcaaggcccctgccctccacctgagcagctaactcggggtttcctcttcacccgagtctcactgagca

SEQ ID NO: 73128 - DNA, 110 bp, synthetic construct
  source 1..110: mol_type = other DNA
cctccacctgagcagctaactcggggtttcctcttcacccgagtctcactgagcagagctgcagcctaggagccaaaaggtttaggggtatgcagcttggattgtgagca

SEQ ID NO: 73129 - DNA, 110 bp, synthetic construct; identical to SEQ ID NO: 73127
  source 1..110: mol_type = other DNA

SEQ ID NO: 73130 - DNA, 110 bp, synthetic construct; identical to SEQ ID NO: 73128
  source 1..110: mol_type = other DNA

SEQ ID NO: 73131 - DNA, 110 bp, synthetic construct
  source 1..110: mol_type = other DNA
cactcttctccaattacctctgaggccaaaacccaactttgaggctggttactttttctctccattatggaatgattcctttagagtaaatgaagtgcatttaggctgat

SEQ ID NO: 73132 - DNA, 110 bp, synthetic construct
  source 1..110: mol_type = other DNA
ccaaaacccaactttgaggctggttactttttctctccattatggaatgattcctttagagtaaatgaagtgcatttaggctgatccccttccaaggccatttttcattc

SEQ ID NO: 73133 - DNA, 110 bp, synthetic construct
  source 1..110: mol_type = other DNA
agacagagaaaaactgactagaagacatttttatcttaaacaccttatgacaacctgcttgcagttgcatttaactgagctcagttgctgtgaagaatatagctcatgca

SEQ ID NO: 73134 - DNA, 110 bp, synthetic construct
  source 1..110: mol_type = other DNA
ttaaacaccttatgacaacctgcttgcagttgcatttaactgagctcagttgctgtgaagaatatagctcatgcacaggtatggatgaataactcgtatatttttcaagt

SEQ ID NO: 73135 - DNA, 110 bp, synthetic construct
  source 1..110: mol_type = other DNA
caaaggttagtgtcttcatctggaatgttttaattagtgtgtgggagcagttgttcgttactaggctcatattggtgaaagctattattggttggcagagggcatatgcc

SEQ ID NO: 73136 - DNA, 110 bp, synthetic construct
  source 1..110: mol_type = other DNA
tcgcagtgtaaagataaggggttcaccagtgagcacagccagctgccccaccagttccccaggctgtgcgacgaacaagcacacgtcctcagccttgttgatcatgcgct

SEQ ID NO: 73137 - DNA, 110 bp, synthetic construct
  source 1..110: mol_type = other DNA
tgtatttattatttttaattaaatggtttttttgtctctttcctgcagcatgtgtaagttcccaggccgaggtcgaatcggaagtgtggctgccagcctatgccacagcc

SEQ ID NO: 73138 - DNA, 110 bp, synthetic construct
  source 1..110: mol_type = other DNA
taattaaatggtttttttgtctctttcctgcagcatgtgtaagttcccaggccgaggtcgaatcggaagtgtggctgccagcctatgccacagccacagctactcgggat

SEQ ID NO: 73139 - DNA, 110 bp, synthetic construct
  source 1..110: mol_type = other DNA
cttggcttgcccagtatagacgttcattgaaatgaactgaaatccaatctctgggctctaggtgtccagctcacaggcagtttagacccagctcaccttcccaaaatcct

SEQ ID NO: 73140 - DNA, 110 bp, synthetic construct
  source 1..110: mol_type = other DNA
ctctaggtgtccagctcacaggcagtttagacccagctcaccttcccaaaatcctgcacatcgaagaggtcaaaggcttcaaagagttcactccgcttgaggccaaactt

SEQ ID NO: 73141 - DNA, 110 bp, synthetic construct
  source 1..110: mol_type = other DNA
ggaagctgcaaaaatggtacagagccatctcctgcatcctttacagagatttcgccaatggagcatcttaagtaatcatacagtgtcaaaaccaggtaatttacattgat

SEQ ID NO: 73142 - DNA, 110 bp, synthetic construct
  source 1..110: mol_type = other DNA
caatggagcatcttaagtaatcatacagtgtcaaaaccaggtaatttacattgatgtgatctacagacctcattcagatttcagcagcagtttacatttattcatatgtg

SEQ ID NO: 73143 - DNA, 110 bp, synthetic construct
  source 1..110: mol_type = other DNA
ctccaaattcatacgttgaaacctaatccttagtgtgaatgtactaagaggcggggcctgtgggaggtgcttcatggggatgaggccctcatgaatagaatcagtgccct

SEQ ID NO: 73144 - DNA, 110 bp, synthetic construct
  source 1..110: mol_type = other DNA
aagaggcggggcctgtgggaggtgcttcatggggatgaggccctcatgaatagaatcagtgcccttacaaaagagatcccaggagttcccgtcgtggctcagaggttaac

SEQ ID NO: 73145 - DNA, 110 bp, synthetic construct
  source 1..110: mol_type = other DNA
tgcctgtgtgcgtgttttgagggaagagaccatgaggtgatcaggcagtgatagaggtagggagctggagacgaggacagatctgatgagaatgacttgccttggggaat

SEQ ID NO: 73146 - DNA, 110 bp, synthetic construct
  source 1..110: mol_type = other DNA
ggtagggagctggagacgaggacagatctgatgagaatgacttgccttggggaatacaggaagtagatgagcagggggaggatctctgggatgtggagagcctgtcacat

SEQ ID NO: 73147 - DNA, 110 bp, synthetic construct
  source 1..110: mol_type = other DNA
cccccctgctgcctccaaccccacacgccctgggctgagtgctggctcaggcggggcacagtctagcagggtggcctggtctgtctccttcagggagttttcctggacca

SEQ ID NO: 73148 - DNA, 110 bp, synthetic construct
  source 1..110: mol_type = other DNA
gcacagtctagcagggtggcctggtctgtctccttcagggagttttcctggaccagagttgagttgtccagattctccgtcgagttgtctagagctggtctgtccctgga

SEQ ID NO: 73149 - DNA, 110 bp, synthetic construct
  source 1..110: mol_type = other DNA
gcttaaggcttctgcttggtgctgtcaccatcccaactttactggcctagagccggccttgcccacttgtgctcgcactcgagtgagttatgctgcctgctttggctgtg

SEQ ID NO: 73150 - DNA, 110 bp, synthetic construct
  source 1..110: mol_type = other DNA
actcacaggcctttgcggggggaggctacctgcccatctcccaaggcccctgcatggaccttgtagctcagggttcccagaggatggaaccagaagcagccccctcttcc

SEQ ID NO: 73151 - DNA, 110 bp, synthetic construct
  source 1..110: mol_type = other DNA
aaggagagcacatgcccctgccttttaagagcatgaccaggaaaggatcacatcatttctcttccattcacagtgaattggcaaagtgcagctccctgaccatgcctggc

SEQ ID NO: 73152 - DNA, 110 bp, synthetic construct
  source 1..110: mol_type = other DNA
tttctcttccattcacagtgaattggcaaagtgcagctccctgaccatgcctggctacggcagaggctggcagtggtcttattctgggcgactgtgtgcccagccaacac

SEQ ID NO: 73153 - DNA, 110 bp, synthetic construct
  source 1..110: mol_type = other DNA
tattgctcattccttgcagaagacaggtaccgagatagactgggacctgggacactttactgcagtgcttacacctggacaagtttccccccaaagaacaggatacaaag

SEQ ID NO: 73154 - DNA, 110 bp, synthetic construct
  source 1..110: mol_type = other DNA
atgtctgaaaattatcttgccaactgagttttggggcgcttgctgtcttaaatttttcaccaaaggcgtgtcccactctcctcactctagcctgggttctgctaattcac

SEQ ID NO: 73155 - DNA, 110 bp, synthetic construct
  source 1..110: mol_type = other DNA
aggtttttttagctcatttccggcaccccttctcttctctgggttcgtttgggattagcagcatgttggaagctgtggtcagttgtgctggtaacaagtgtatttgaccc

SEQ ID NO: 73156 - DNA, 110 bp, synthetic construct
  source 1..110: mol_type = other DNA
tagcagcatgttggaagctgtggtcagttgtgctggtaacaagtgtatttgaccctggtctgatttcagtttcgttgtgagttgagagagtggctggttgggctgcattt

SEQ ID NO: 73157 - DNA, 110 bp, synthetic construct
  source 1..110: mol_type = other DNA
ctggtggaagatggttttgtgtctgagccagctttgatggctcactcccctttgcttcaggactctggagaaaggaaggcaggcaggacacctgccacgtgttgaatgcc

SEQ ID NO: 73158 - DNA, 110 bp, synthetic construct
  source 1..110: mol_type = other DNA
ttcaggactctggagaaaggaaggcaggcaggacacctgccacgtgttgaatgcctgcccagtgatggggttgtgcagcaggtcctggccttgctaaccccttttggagg

SEQ ID NO: 73159 - DNA, 110 bp, synthetic construct
  source 1..110: mol_type = other DNA
agagcgcccactttcttaattaataactattttttaggacagtttcagatttacagattggctgggaaacagttgctgtgggtcccacaaccagtccctgtcattcacac

SEQ ID NO: 73160 - DNA, 110 bp, synthetic construct
  source 1..110: mol_type = other DNA
gattggctgggaaacagttgctgtgggtcccacaaccagtccctgtcattcacacccaccttagcaccacatgtgtcccagctgactcgcccgccagtgttgaaatgtca

SEQ ID NO: 73161 - DNA, 110 bp, synthetic construct
  source 1..110: mol_type = other DNA
agttagattcttaactgactgtgccatggtaactccaagtcactgaatttttgtgatgtaaatgcccatcaaaggatttgtactcaaaaatatagaaggaagttatatag

SEQ ID NO: 73162 - DNA, 110 bp, synthetic construct
  source 1..110: mol_type = other DNA
gagggtaactggctctgttgcatagaggatccagcccaggcctggtcctcaggtaactgactgcctctcaccattcccaccacatctggcctttcttttctcacttggcc

SEQ ID NO: 73163 - DNA, 110 bp, synthetic construct
  source 1..110: mol_type = other DNA
aggggacacagtgcaagggacaccaggtccctgagtttggcctgggaaaatggtaggagactcatgccaacatagagaagaggaaggtgggcagacagaatctccttgct

SEQ ID NO: 73164 - DNA, 110 bp, synthetic construct
  source 1..110: mol_type = other DNA
agctggcttctgtgtgcttatatttatttttgctaaagttccccagtcatctcttggtttgataaagcttagcttctactgggttcttcaagaagggctcatgagtattg

SEQ ID NO: 73165 - DNA, 110 bp, synthetic construct
  source 1..110: mol_type = other DNA
ggtttgataaagcttagcttctactgggttcttcaagaagggctcatgagtattgtattcctggatttctttcatgctgagattgtttcctatacctttgatacttgaag

SEQ ID NO: 73166 - DNA, 110 bp, synthetic construct
  source 1..110: mol_type = other DNA
cacataagcccccctcgtctctgtcccttgtgaacttctgctgtactgagagctgcactgtttaggcttgtccagcttgggtttatttacctggcattcctctcttcagt

SEQ ID NO: 73167 - DNA, 110 bp, synthetic construct
  source 1..110: mol_type = other DNA
cccaagcgtgctcccccatcttggcgtccatcaccaggttatacctctgcatacagtcttctgtacccaccatctcccagaggtgcaacggggtagctatagtccatcag

SEQ ID NO: 73168 - DNA, 110 bp, synthetic construct
  source 1..110: mol_type = other DNA
gtcttctgtacccaccatctcccagaggtgcaacggggtagctatagtccatcagcagacgtgacctggagagaagagagcagaaccatagttgagcagcttccgctctg

SEQ ID NO: 73169 - DNA, 110 bp, synthetic construct
  source 1..110: mol_type = other DNA
cccgtcggccacagcgaggacctgtcgggaggcccttcgagagccgcggggggttgtgttgtggtagacccagcgctcccctctgtgcctggtctcggtcgccggtagca

SEQ ID NO: 73170 - DNA, 110 bp, synthetic construct
  source 1..110: mol_type = other DNA
gtgttgtggtagacccagcgctcccctctgtgcctggtctcggtcgccggtagcatttgggtgttttccggagtcgcatatctgtccctgtctgtgagtgagccaaaggc

SEQ ID NO: 73171 - DNA, 110 bp, synthetic construct
  source 1..110: mol_type = other DNA
aaaaaaatctgtaatggaaaaaacagagacatttgcaaaagcagacgggaataacaaaatgaacccacatccagctccagcaaatttcagctctcctccatcccatcccc

SEQ ID NO: 73172 - DNA, 110 bp, synthetic construct
  source 1..110: mol_type = other DNA
catttagctggaaagcgtaggtagcaaatgtgaaagggcacaagatggcaggtaggtttaacactcagcaggtatactagctcatgtttattgaatacttcctgtttgcc

SEQ ID NO: 73173 - DNA, 110 bp, synthetic construct
  source 1..110: mol_type = other DNA
atgtaggaggcagccctgactgcggagggacagtggcaggtgacgtttcaccaccccctcagaataaaaatgagtccttctcgaatgccttatctgcagaggctttcaca

SEQ ID NO: 73174 - DNA, 110 bp, synthetic construct
  source 1..110: mol_type = other DNA
ccctcagaataaaaatgagtccttctcgaatgccttatctgcagaggctttcacacacaaccatttgaagtaactggaattattcctgttttacagtttctacacaatta

SEQ ID NO: 73175 - DNA, 110 bp, synthetic construct
  source 1..110: mol_type = other DNA
ggtagccctatgaagaaatgaggttcaaaagattaagcccttcagcaaggtctcagacccctgtcacctgttgtgatcacccacatatcccttgctcttagccagcacac

SEQ ID NO: 73176 - DNA, 110 bp, synthetic construct
  source 1..110: mol_type = other DNA
gacccctgtcacctgttgtgatcacccacatatcccttgctcttagccagcacaccttccagatactgtctgtgagaaggcccagtacagtatcttgtctaccagggctc

SEQ ID NO: 73177 - DNA, 110 bp, synthetic construct
  source 1..110: mol_type = other DNA
ggcctttctctatcccgtcacctcccttccagccacaagattccactcaagtctccctaaatccacccaaccttccctcctctgtccctttgcaaagatgcccaggatcc

SEQ ID NO: 73178 - DNA, 110 bp, synthetic construct
  source 1..110: mol_type = other DNA
ctctggtacctcattttctttccatgtttttttcctccacttaagaaaaagctgtaacgagacagcctacggagtggcaagactgattatatcgttctggcctttgaggg

SEQ ID NO: 73179 - DNA, 110 bp, synthetic construct
  source 1..110: mol_type = other DNA
aacgagacagcctacggagtggcaagactgattatatcgttctggcctttgagggaagagggggaaaaaatcaaattatcggacagggtccttttaaggagctgctactt

SEQ ID NO: 73180 - DNA, 110 bp, synthetic construct; identical to SEQ ID NO: 73178
  source 1..110: mol_type = other DNA

SEQ ID NO: 73181 - DNA, 110 bp, synthetic construct; identical to SEQ ID NO: 73179
  source 1..110: mol_type = other DNA

SEQ ID NO: 73182 - DNA, 110 bp, synthetic construct
  source 1..110: mol_type = other DNA
ggcctgggggatcaggcctgatgctcctgagagcccctggtcccccatgtaccactaggagtggagatgaagtggtaaaaagggagcttccggtatcatgcccagatctc

SEQ ID NO: 73183 - DNA, 110 bp, synthetic construct
  source 1..110: mol_type = other DNA
taggagtggagatgaagtggtaaaaagggagcttccggtatcatgcccagatctccctattggaccttgagcagaggtcctgaaccttgccgagcctcagctttttcttc

SEQ ID NO: 73184 - DNA, 110 bp, synthetic construct; identical to SEQ ID NO: 73182
  source 1..110: mol_type = other DNA

SEQ ID NO: 73185 - DNA, 110 bp, synthetic construct; identical to SEQ ID NO: 73183
  source 1..110: mol_type = other DNA

SEQ ID NO: 73186 - DNA, 110 bp, synthetic construct
  source 1..110: mol_type = other DNA
cccatctccgtacctgtaatcacctctgcctgaaatcattcccaccaccgttttattttatgtgcgttgtgcccatagctcccgactgtttttacagcatttatcatatt

SEQ ID NO: 73187 - DNA, 110 bp, synthetic construct
  source 1..110: mol_type = other DNA
ttttatgtgcgttgtgcccatagctcccgactgtttttacagcatttatcatattcacaattccaggatttactatttctgccatgctgttagacggaggtatgttgaac

SEQ ID NO: 73188 - DNA, 110 bp, synthetic construct
  source 1..110: mol_type = other DNA
tcctctccttgtgcatctgggctggcctgggactactttgaccaatagaatgcacaagcgatgcaatgcaagctctgggctgacccttggagagaacagtttcctcctgg

SEQ ID NO: 73189 - DNA, 110 bp, synthetic construct
  source 1..110: mol_type = other DNA
tgggcctggtcccagaaagcacttgctcatttagatgaactgcatctggcatgtgctcaatgtagctaacaaaggtagttttctagcaacacgggggcgcagggagacag

SEQ ID NO: 73190 - DNA, 110 bp, synthetic construct
  source 1..110: mol_type = other DNA
gagctcattgattctcctgaggccagcttgtgaaaaataaagtcttcatgtggtattttctaaatatttccacttttacctacttacctaagagcatttttacacatttc

SEQ ID NO: 73191 - DNA, 110 bp, synthetic construct
  source 1..110: mol_type = other DNA
acaaaactgctgaggatggaagatttacagatgtaggcattatctagctggtctgcctcgctcagttatgcctgggagatcaacacggggactttgagttggtttaaaat

SEQ ID NO: 73192 - DNA, 110 bp, synthetic construct
  source 1..110: mol_type = other DNA
ctattgactaaacctccctgtctatggtgttctgttatagcagccagagctagctaaaaacgtgtcctgccaggttggttggttggttggtttttcagatatccccagaa

SEQ ID NO: 73193 - DNA, 110 bp, synthetic construct
  source 1..110: mol_type = other DNA
aacacaagggaaccccctaaaagcaaaagaaattgtgcatttgtgtctgcacccagcaaagcactcagaaaacatgcagccttctcttgctctgtttggtttttgtggag

SEQ ID NO: 73194 - DNA, 110 bp, synthetic construct
  source 1..110: mol_type = other DNA
gcaaagcactcagaaaacatgcagccttctcttgctctgtttggtttttgtggaggagcaatacttaggatttgtgaggaggatactgttgggcttgaagcaaagacccc

SEQ ID NO: 73195 - DNA, 110 bp, synthetic construct
  source 1..110: mol_type = other DNA
tgttcaaaagttctataaattgggattttgaacaaaacatggttgatcgtggcttattcctgctctaccatgtttagggtcttggccaggaaaatgtgagggtctgggac

SEQ ID NO: 73196 - DNA, 110 bp, synthetic construct
  source 1..110: mol_type = other DNA
attcctgctctaccatgtttagggtcttggccaggaaaatgtgagggtctgggactaactcaaccagtggggctggaatcatctctaagcctccttacacacactggctg

SEQ ID NO: 73197 - DNA, 110 bp, synthetic construct
  source 1..110: mol_type = other DNA
caataaaaaaaatttatgatacgtgaaagtgtggctcactactgaaataaaagttttaatggagtttaaatgaccaggacaaaggttgatggaaaggacttagggatctg

SEQ ID NO: 73198 - DNA, 110 bp, synthetic construct
  source 1..110: mol_type = other DNA
tggtgggttttctttaaaggagttttaactcccctaagtctctgccatggtggcggtgacgcatcacttccagctgctttccatctacctcacacatgtgtgttcagaag

SEQ ID NO: 73199 - DNA, 110 bp, synthetic construct
  source 1..110: mol_type = other DNA
atcaccttctattgcccttccctcagtgacgtctgaagaaaaataagattcagttgggttttgtgccttcacactccactgagggaagccttctcctatcgttcaccctg

SEQ ID NO: 73200 - DNA, 110 bp, synthetic construct
  source 1..110: mol_type = other DNA
atctgaattactgaagtagcttccaggtagaaagctacctggtctctgcttcttctcttgtcctgtagagcccattcttagcatggcagctggagatatctcttaaaagg

SEQ ID NO: 73201 - DNA, 110 bp, synthetic construct
  source 1..110: mol_type = other DNA
aaggctaaaattgttcttcaaacaagaggcaggcagagaacatgggggaaggagagtctttcccaggaaggcctcatgtgactctgctgggttacaatcccctttcttct

SEQ ID NO: 73202 - DNA, 110 bp, synthetic construct
  source 1..110: mol_type = other DNA
gtctttcccaggaaggcctcatgtgactctgctgggttacaatcccctttcttctttgatcaatcttgaaaaggaacaaatataggataagaaagggaataaagttttgg

SEQ ID NO: 73203 - DNA, 110 bp, synthetic construct
  source 1..110: mol_type = other DNA
taaagagaccaggatattcagacttggaatcaagaattctaccatctagtcttgactctgagctcaacaggttaggtcaactctagtgaattaaatgcttgggccttatt

SEQ ID NO: 73204 - DNA, 110 bp, synthetic construct
  source 1..110: mol_type = other DNA
ctctgagctcaacaggttaggtcaactctagtgaattaaatgcttgggccttatttaaatggggttcctcatctgtaaaataagcaagttagaattttttttatgaccat

SEQ ID NO: 73205 - DNA, 110 bp, synthetic construct
  source 1..110: mol_type = other DNA
tatttgtaatgaattatttagacagttctcagccctgccttctgagcgttagcgattttaaaagagaacttttgtgcaattcaaaatgaagtttttataagtaattgaaa

SEQ ID NO: 73206 - DNA, 110 bp, synthetic construct
  source 1..110: mol_type = other DNA
agcaaaagtattaattttgaaaaagcttaattttccacttatgtctcaaatggtttgtggtttttaatgccctaagaaatgttggcctgggagttcctcttgtgactcag

SEQ ID NO: 73207 - DNA, 110 bp, synthetic construct; identical to SEQ ID NO: 73206
  source 1..110: mol_type = other DNA

SEQ ID NO: 73208 - DNA, 110 bp, synthetic construct
  source 1..110: mol_type = other DNA
ggtgggttatctgtcttcatgattgtaaaactcttgattcctgggactgtccttggactgggagagcttagagtggtcctgtggccttggacctgcaggagtagaacaac

SEQ ID NO: 73209 - DNA, 110 bp, synthetic construct
  source 1..110: mol_type = other DNA
gccagcagtgcctcctcattcagcagttggggagagccgtgtggtcagagtggctgggaggcgtgtctctcttcaccttcttgtctcatcctcctctcctctccaaagct

SEQ ID NO: 73210 - DNA, 110 bp, synthetic construct
  source 1..110: mol_type = other DNA
gggaggcgtgtctctcttcaccttcttgtctcatcctcctctcctctccaaagctaggattgtcatacctatgagccccacctcctccttgcttctgtgtctttggcaaa

SEQ ID NO: 73211 - DNA, 110 bp, synthetic construct
  source 1..110: mol_type = other DNA
acgacacaagaggtctcctcggcctgactctactgacaccaccatacctgtgcattccggaggagagcacaccagtggtttctgaaggtgcctgccggctccacaggtag

SEQ ID NO: 73212 - DNA, 110 bp, synthetic construct
  source 1..110: mol_type = other DNA
aggcagagaacggtttctgggtccacagagcctggagctactgacactccatctagcaagtcctcctcctccatccagcaagtcagaaggactctgatcgtgagaatttt

SEQ ID NO: 73213 - DNA, 110 bp, synthetic construct
  source 1..110: mol_type = other DNA
tccttctgataacctttgaaccagctatagaaaaggaaaattactgaactgatgaaatggaaagaatgactatgtatagagacagagaaacacaaaggaaataatatctg

SEQ ID NO: 73214 - DNA, 110 bp, synthetic construct
  source 1..110: mol_type = other DNA
ctctctgcctgtctcagggctgcacggggggtagggggtggcaattctttcaggacagaacaccctcctgatggcccaccatcataaaacaagtctaaagaattagatac

SEQ ID NO: 73215 - DNA, 110 bp, synthetic construct
  source 1..110: mol_type = other DNA
acaggtggggcccaaggtcacacagctaacaaggagcccaagcacctctcacatgacctcccaggggtctagaaggccatgcaatgttggggcttcaagggcaagggatg

SEQ ID NO: 73216 - DNA, 110 bp, synthetic construct
  source 1..110: mol_type = other DNA
ttttcgtcaggccttttgtggtaagctgaccctacagaacatctgcctggcacatgagacacaaaattcttttttgggaagccttttgtgtgttcccagagagactgctt

SEQ ID NO: 73217 - DNA, 110 bp, synthetic construct
  source 1..110: mol_type = other DNA
gcatttattttaatcaggaactgctaagtgctccgatttgtctccattccatgtctcgaatgccacgtcctcagctttgccgagagatgcttttcctattgacagactca

SEQ ID NO: 73218 - DNA, 110 bp, synthetic construct
  source 1..110: mol_type = other DNA
ttagggctgcacccgcggcatatgtatactcttctttctcttcggtgttggctctctctgattatcaggaggtcaatccattgcatcaacagcttctcttgcctcaataa

SEQ ID NO: 73219 - DNA, 110 bp, synthetic construct
  source 1..110: mol_type = other DNA
ggcctgctgaaagtcttttcaaattttgtccttcccaccctttttctgaagccggtttctggttggttctgtcaacaccaagggctcttggatgacagttgctgggtaat

SEQ ID NO: 73220 - DNA, 110 bp, synthetic construct
  source 1..110: mol_type = other DNA
aggtacagtaaattgtgtgttttaaacagctgcaacattagctactgactttcggaagtcagttaaaaaacaccatttaagaagcgtggcctggagttcccactgtggtg

SEQ ID NO: 73221 - DNA, 110 bp, synthetic construct
  source 1..110: mol_type = other DNA
atccttacaacatcagtactgaggtgagagcaatgaagctcgagaagtaaacatattattgtcctcaaatcaaaatttagtagatggtcgagttaagatgcaaatgcagg

SEQ ID NO: 73222 - DNA, 110 bp, synthetic construct
  source 1..110: mol_type = other DNA
cagaaagaccgactcagcccatctaaaaggtaccccacaacacagctctgattcccaaaaggaagtgtgttgctggggacaggaagacgtctcctacttaagactacttc

SEQ ID NO: 73223 - DNA, 110 bp, synthetic construct
  source 1..110: mol_type = other DNA
ccacccccaccccagagcagcacttcaccgagccctgagaggactcaaccgccatcacgaggtagtggttcgtgccgtgtattacaccaacaccctagagctgcctggtt

SEQ ID NO: 73224 - DNA, 110 bp, synthetic construct
  source 1..110: mol_type = other DNA
cacgaggtagtggttcgtgccgtgtattacaccaacaccctagagctgcctggttactcctcatttccacccggtgtggcagctgttttctattttctcgcccctttgga

SEQ ID NO: 73225 - DNA, 110 bp, synthetic construct; identical to SEQ ID NO: 73223
  source 1..110: mol_type = other DNA

SEQ ID NO: 73226 - DNA, 110 bp, synthetic construct; identical to SEQ ID NO: 73224
  source 1..110: mol_type = other DNA

SEQ ID NO: 73227 - DNA, 110 bp, synthetic construct
  source 1..110: mol_type = other DNA
tcagtttccttgttcttttatggagtacttttggagattcttagtctgcattttcactgatatcctcttacatactatctcaattacatagctttataggaagtcctccc

SEQ ID NO: 73228 - DNA, 110 bp, synthetic construct
  source 1..110: mol_type = other DNA
actgatatcctcttacatactatctcaattacatagctttataggaagtcctcccatctctgatgttacacacatgccttattcctcattttagtagtgctctgtacaat

SEQ ID NO: 73229 - DNA, 110 bp, synthetic construct
  source 1..110: mol_type = other DNA
actttttggccactgggtcaaactagaccgtagtctctcctgacccagagcatcaggaacttttgtctgaaacatgaagcaaatgagaatggtacttgcagtctgtgcga

SEQ ID NO: 73230 - DNA, 110 bp, synthetic construct
  source 1..110: mol_type = other DNA
ggaacttttgtctgaaacatgaagcaaatgagaatggtacttgcagtctgtgcgatcagcataaatgtaattaaaggagaaggagcatttatttatatgtgctcagtctt

SEQ ID NO: 73231 - DNA, 110 bp, synthetic construct
  source 1..110: mol_type = other DNA
tgtgtatgaattggagtcaccaagaattgagatacgagtggtgctggaagagagactgacagtgagctgggagctaagggccttcagccctagaagactgtctggggggt

SEQ ID NO: 73232 - DNA, 110 bp, synthetic construct
  source 1..110: mol_type = other DNA
ctgacagtgagctgggagctaagggccttcagccctagaagactgtctggggggtggtgagccgggggcgtctgtcatgactgcaaaaaaggaaggatgatgggtggcag

SEQ ID NO: 73233 - DNA, 110 bp, synthetic construct
  source 1..110: mol_type = other DNA
attgtctcagatagaggcatggtcactggtagggatcagaagtttttcccccaggagcaacaagctggcaaaaggttagactcagggagaccaaaataaatgagaaaaaa

SEQ ID NO: 73234 - DNA, 110 bp, synthetic construct
  source 1..110: mol_type = other DNA
cagtctttaaaatccttagaagcacagctgttcaggtctagaggctgaattttcgcaagtcattcacatgcagagtcatttgttagacaaggatcaaatgattttctgca

SEQ ID NO: 73235 - DNA, 110 bp, synthetic construct
  source 1..110: mol_type = other DNA
tagagagtacagttccctaaacaagaatattctcctacataaccacagcacaacgctcgaagtcaggaaattgacattgatgtaatgctaccatcccaaaacacacaggc

SEQ ID NO: 73236 - DNA, 110 bp, synthetic construct
  source 1..110: mol_type = other DNA
ctcgaagtcaggaaattgacattgatgtaatgctaccatcccaaaacacacaggcctcatttaaattttgccatttgtctcagcaatgttccttttatctctgtgggacc

SEQ ID NO: 73237 - DNA, 110 bp, synthetic construct; identical to SEQ ID NO: 73235
  source 1..110: mol_type = other DNA

SEQ ID NO: 73238 - DNA, 110 bp, synthetic construct; identical to SEQ ID NO: 73236
  source 1..110: mol_type = other DNA

SEQ ID NO: 73239 - DNA, 110 bp, synthetic construct
  source 1..110: mol_type = other DNA
gtatatacactgttctgaaaccatcatcactatataacttcagagcattttcatcaccccaaaaagaaactccaaactcactatcagtcattcctcataacctccatcct

SEQ ID NO: 73240 - DNA, 110 bp, synthetic construct
  source 1..110: mol_type = other DNA
accccaaaaagaaactccaaactcactatcagtcattcctcataacctccatcctttcagctctaggcaactactaattctttatcatttgccttttctgggtacttcac

SEQ ID NO: 73241 - DNA, 110 bp, synthetic construct
  source 1..110: mol_type = other DNA
ggaggctgtggcaggcaagagggaacgattctgtgacagctgcatgggtgggaatgaccatcttcaaggaggtagagggaaaaggaagtgtttaaaggaggtatttgagg

SEQ ID NO: 73242 - DNA, 110 bp, synthetic construct
  source 1..110: mol_type = other DNA
gccaacaggcaaaatgtcttcaaaaacttttttaggagaatctcctttgagttccttttgaacttctgtcacccaagctctttcaaaacacaggaaaaaacatactgacc

SEQ ID NO: 73243 - DNA, 110 bp, synthetic construct
  source 1..110: mol_type = other DNA
ttttgaacttctgtcacccaagctctttcaaaacacaggaaaaaacatactgacctgggaatgaattcccgtcgatctgtttcatactagtttatctttttggtagaaca

SEQ ID NO: 73244 - DNA, 110 bp, synthetic construct
  source 1..110: mol_type = other DNA
ctctcagcttgatagcaagtcttggaatagcagtttactgatgaggaaagcagtgaagtcacacagtggttccctgagattcacatggaggcagtctgatctgtgccaag

SEQ ID NO: 73245 - DNA, 110 bp, synthetic construct
  source 1..110: mol_type = other DNA
aagtcacacagtggttccctgagattcacatggaggcagtctgatctgtgccaagtctctgccccatcatacacagtgcatccaggcttggggctctgtctggctgacag

SEQ ID NO: 73246 - DNA, 110 bp, synthetic construct
  source 1..110: mol_type = other DNA
gataatatagtaaatacacaccccgagtacactcacatttcttggcgtggggcagccttcagcagtctccccttcaagtgtgttgggtactctggcaccctcagtcccta

SEQ ID NO: 73247 - DNA, 110 bp, synthetic construct
  source 1..110: mol_type = other DNA
ccttcagcagtctccccttcaagtgtgttgggtactctggcaccctcagtccctactgcaccagggtttccgttacccacaaggagaacacggcagcgataccctccagc

SEQ ID NO: 73248 - DNA, 110 bp, synthetic construct
  source 1..110: mol_type = other DNA
ttctcactgtctctatttgcagaacgaggacgatcactggaatgatctcggaggttctttcagcttcaaaattcttcaactctgcttgatactcagaaccttaatcatga

SEQ ID NO: 73249 - DNA, 110 bp, synthetic construct
  source 1..110: mol_type = other DNA
ggggctagagaactatggaatctgatggatggctaaaggacatttccagctaatttattattaaactgtattgttcatgtctttcacttgcctcagggtaagttgtagct

SEQ ID NO: 73250 - DNA, 110 bp, synthetic construct
  source 1..110: mol_type = other DNA
ttctttttctggaacccctataatttggatattagtgtgcttgatgttatcccagaagtctcttaaaatgtcctcttttcagccttttttctgttcagctgcatgatttc

SEQ ID NO: 73251 - DNA, 110 bp, synthetic construct
  source 1..110: mol_type = other DNA
aagtctcttaaaatgtcctcttttcagccttttttctgttcagctgcatgatttcctctactcttcttgtcattgatccattcttctacatcactgtctactattgatcc

SEQ ID NO: 73252 - DNA, 110 bp, synthetic construct
  source 1..110: mol_type = other DNA
ttctgctcacagttctagaggctgggaattccaagatcaaagcactagaatggctgagtgaggggtcttttcctgggtcacaaccagcacagttctcattatagcctttc

SEQ ID NO: 73253 - DNA, 110 bp, synthetic construct
  source 1..110: mol_type = other DNA
gagtgaggggtcttttcctgggtcacaaccagcacagttctcattatagcctttccttccaggggtagggagctatgttgtctctcttttgcaagagtattaatcctatt

SEQ ID NO: 73254 - DNA, 110 bp, synthetic construct
  source 1..110: mol_type = other DNA
gtagctggggcctggggcaagtatgtaggaaggtcagtcatgtgaatagggtgtagatgaaataggcactggtccagcaggagatgtgcagagagcaagagaacagacat

SEQ ID NO: 73255 - DNA, 110 bp, synthetic construct
  source 1..110: mol_type = other DNA
gatgaaataggcactggtccagcaggagatgtgcagagagcaagagaacagacatcttgagtcacctaaccatacatatatatttgtgtatatatttagtgagtaacaag

SEQ ID NO: 73256 - DNA, 110 bp, synthetic construct; identical to SEQ ID NO: 73255
  source 1..110: mol_type = other DNA

SEQ ID NO: 73257 - DNA, 110 bp, synthetic construct; identical to SEQ ID NO: 73255
  source 1..110: mol_type = other DNA

SEQ ID NO: 73258 - DNA, 110 bp, synthetic construct
  source 1..110: mol_type = other DNA
ttcaacaagaggtgtctgagtatgtaagagactaggcatagctactaacatcacctttagattagaaggacagaatttaggatttagagtccacaaaaaagggcaagatt

SEQ ID NO: 73259 - DNA, 110 bp, synthetic construct
  source 1..110: mol_type = other DNA
ttgttttaaactaattatcatattctgttcattctaggcctttttgggttcattcatatgctaagcttgctgctagtagtgtaagaagaaatagtgctattgtgagtatt

SEQ ID NO: 73260 - DNA, 110 bp, synthetic construct; identical to SEQ ID NO: 73259
  source 1..110: mol_type = other DNA

SEQ ID NO: 73261 - DNA, 110 bp, synthetic construct
  source 1..110: mol_type = other DNA
aactgaagagtccaacatgtcttggagctaatgtttgatgttggcttcctggagagccgtgccaggggcccagctggctataggctcagtggttcttaaagaaactggcc

SEQ ID NO: 73262 - DNA, 110 bp, synthetic construct
  source 1..110: mol_type = other DNA
ctggacctccctgataaaggtgaaatttaaaaataaatatgcaaaataatgtgtgatgttttataaaagctctccttcatataacagagtgcccatatgcctttttattc

SEQ ID NO: 73263 - DNA, 110 bp, synthetic construct
  source 1..110: mol_type = other DNA
cagttgagcacccaatactgtcccatgaaattttcttcttctgcagtaagcttgctttccaactttgagagacaattctttcataaattcccattccttcagtcttgagg

SEQ ID NO: 73264 - DNA, 110 bp, synthetic construct
  source 1..110: mol_type = other DNA
tgtcctcttatttcatatccaaagaagaagggaaccaaaattgatgagtgagggctgagggacactgttttggccagcagtgagctagagctgtctctctatgtagatga

SEQ ID NO: 73265 - DNA, 110 bp, synthetic construct
  source 1..110: mol_type = other DNA
atactgtggcttcaatatcagcttagttttcaaagcctttgcagtaccattcctgtagtggctaatctagaagctgggccacatcaaaactgcagttcagttttcaaagc

SEQ ID NO: 73266 - DNA, 110 bp, synthetic construct
  source 1..110: mol_type = other DNA
tagtggctaatctagaagctgggccacatcaaaactgcagttcagttttcaaagcttttactatgttattaagggtaatatccatgtatttgcagcttaggagtgagccc

SEQ ID NO: 73267 - DNA, 110 bp, synthetic construct
  source 1..110: mol_type = other DNA
ggcattggcagtggcaacaaaaagccaactgtttttccaaagccagtttctccataacagttgattaagatgccatcagcaaggagctcatgtgaagtaaaaatgtggta

SEQ ID NO: 73268 - DNA, 110 bp, synthetic construct
  source 1..110: mol_type = other DNA
atttccaaacctctcttgcactttgactgaaccagtcacagagctccagactacataatgtgggcagaaatgatacatctacttctaagcttgaccccagaatcttctga

SEQ ID NO: 73269 - DNA, 110 bp, synthetic construct
  source 1..110: mol_type = other DNA
cttttggggtgattttcctaactaatcataaagtttttaggtacaaaactgatttaaacccagctgatcagaatagtgggctagaagcacatacactttggaagctactt

SEQ ID NO: 73270 - DNA, 110 bp, synthetic construct
  source 1..110: mol_type = other DNA
aaacccagctgatcagaatagtgggctagaagcacatacactttggaagctacttcttattactaatacattcaaatataggaacataataacatgcaaagtcttccaac

SEQ ID NO: 73271 - DNA, 110 bp, synthetic construct
  source 1..110: mol_type = other DNA
ttcacaagtctgcatctaaaatacaggagaatttataaaaatcaaatctctctcatctcaatataggtatcacacattcctctcttcaaaatctaccaaaaaaatcaccc

SEQ ID NO: 73272 - DNA, 110 bp, synthetic construct
  source 1..110: mol_type = other DNA
tcttaaagccaattaagtatatatgtcttatcaagtgcaactaaatttccttgtgtacactagctcaagagagtgcaccaacggacttcacagtcacactgcagtgtcac

SEQ ID NO: 73273 - DNA, 110 bp, synthetic construct
  source 1..110: mol_type = other DNA
tacactagctcaagagagtgcaccaacggacttcacagtcacactgcagtgtcacacaggactcctgaagccatcccctctacccgtagtgctattaaggaaaaaaactt

SEQ ID NO: 73274 - DNA, 110 bp, synthetic construct; identical to SEQ ID NO: 73272
  source 1..110: mol_type = other DNA

SEQ ID NO: 73275 - DNA, 110 bp, synthetic construct; identical to SEQ ID NO: 73273
  source 1..110: mol_type = other DNA

SEQ ID NO: 73276 - DNA, 110 bp, synthetic construct
  source 1..110: mol_type = other DNA
gaactccaggactcttatggtagcatttgcataacattaataacttggtcttcttcaggtttttcactcagctgagtttagcataatcttttgggtttccttcttggaag

SEQ ID NO: 73277 - DNA, 110 bp, synthetic construct
  source 1..110: mol_type = other DNA
aatgctggaactgcccccttattttttcctttctctgtgatgagaaagaaaagagaggaggactattgaactttaaacttcctgataaactataatgtgggaaagtgcca

SEQ ID NO: 73278 - DNA, 110 bp, synthetic construct
  source 1..110: mol_type = other DNA
atgaaaccccacttctcacctggcaactccaaaccccagcctctcatttctgcaaactctacagttttgtttcaaatctccacctcagacttcagcaaatactgttctat

SEQ ID NO: 73279 - DNA, 110 bp, synthetic construct
  source 1..110: mol_type = other DNA
actctacagttttgtttcaaatctccacctcagacttcagcaaatactgttctataatgcttgatattgtttcttcttggttacttttataattctatctagcttgcaag

SEQ ID NO: 73280 - DNA, 110 bp, synthetic construct
  source 1..110: mol_type = other DNA
accaggttacttaagtaacaatgtccttttcaattctcatctcatttcttccttggcaaatatgatttcaccatccaactccactacacataagaattcactcctttctt

SEQ ID NO: 73281 - DNA, 110 bp, synthetic construct
  source 1..110: mol_type = other DNA
gcaaatatgatttcaccatccaactccactacacataagaattcactcctttctttgagctcctgccacactctaggcagctgtgctgtcacactgaacatgctgcagta

SEQ ID NO: 73282 - DNA, 110 bp, synthetic construct
  source 1..110: mol_type = other DNA
taatggggtatctacccataacctggccatgcatgattcattccctatgatttgaagcagtatcaatcagtgtgtccagtcataccctaggtattagaaatagaagtgtg

SEQ ID NO: 73283 - DNA, 110 bp, synthetic construct
  source 1..110: mol_type = other DNA
gcccacagctccatcagagagcaggcactggcagccctctcatgaaaatgggcactgccaccactaacttttctgacactggtgtgagcttctgcaaattatctgggaag

SEQ ID NO: 73284 - DNA, 110 bp, synthetic construct
  source 1..110: mol_type = other DNA
tgccaccactaacttttctgacactggtgtgagcttctgcaaattatctgggaagatccaaggtgcctgtgttttctctgatcgacagggggaggacaccatcagtcctc

SEQ ID NO: 73285 - DNA, 110 bp, synthetic construct
  source 1..110: mol_type = other DNA
gtgtttctgtggcaatcctgctttctcccagaagctctgaatctctgcatttacaggagattcctctcctaagttcttagtttcttcgtatttaccctctcttggcccag

SEQ ID NO: 73286 - DNA, 110 bp, synthetic construct
  source 1..110: mol_type = other DNA
ggagattcctctcctaagttcttagtttcttcgtatttaccctctcttggcccagtagctgctttctgtatctgccttttccctagacttagaatccctttttatcctct

SEQ ID NO: 73287 - DNA, 110 bp, synthetic construct
  source 1..110: mol_type = other DNA
aaaaataaatcaaacttctagattttatttaggcaaccaactagagttgtagcctctcaggactctcagatttttgttttacttttttccttctttggtttgatccttgt

SEQ ID NO: 73288 - DNA, 110 bp, synthetic construct; identical to SEQ ID NO: 73287
  source 1..110: mol_type = other DNA

SEQ ID NO: 73289 - DNA, 110 bp, synthetic construct
  source 1..110: mol_type = other DNA
ctttgacatccaggaacaaagaatgtacgactgttttaaaggtcaggtgactataggatctgagctggttttgctgtgctaatgaccccaattacactgaacataaatag

SEQ ID NO: 73290 - DNA, 110 bp, synthetic construct
  source 1..110: mol_type = other DNA
gatgttttaccggggtaaaagacagtcgaaaaatcccaaaggctagcaataacaaaatgagtttttcctgagtactattgtgggtatcgctagtcatctgtagcttggct

SEQ ID NO: 73291 - DNA, 110 bp, synthetic construct
  source 1..110: mol_type = other DNA
aatgagtttttcctgagtactattgtgggtatcgctagtcatctgtagcttggctccactttgccctttatttggaactttgctgactgtcttgcagaggaaaggaagac

SEQ ID NO: 73292 - DNA, 110 bp, synthetic construct
  source 1..110: mol_type = other DNA
gaaagggctacctgaaatagtcaggatcccatagatctttcatgttatatcatggggtttttttggtttttgttttcctcaggccagctggtaaataagctgccacgtga

SEQ ID NO: 73293 - DNA, 110 bp, synthetic construct
  source 1..110: mol_type = other DNA
ggtttttttggtttttgttttcctcaggccagctggtaaataagctgccacgtgactctctgcgacggaaatagccttgggacacaagcaaaacaatccaggtgaaggca

SEQ ID NO: 73294 - DNA, 110 bp, synthetic construct
  source 1..110: mol_type = other DNA
gagaacatcagaaactataatattcaatatcatatggtcatgatagaaggtttctcccagatatcctgtagattgatcaaagatctaattgtctttgctgtcttcttaca

SEQ ID NO: 73295 - DNA, 110 bp, synthetic construct
  source 1..110: mol_type = other DNA
cccagatatcctgtagattgatcaaagatctaattgtctttgctgtcttcttacaatgacagccatttaaatggctgtgtctgttaactgcccactaggtaagtaactct

SEQ ID NO: 73296 - DNA, 110 bp, synthetic construct
  source 1..110: mol_type = other DNA
aaagaattcaataacaggaatagagaggaagagacaaatttgaaagtaaatgcgtaggtggtgaggaaaaatataaaatcttggtatttcttttgacggtggggagaggg

SEQ ID NO: 73297 - DNA, 110 bp, synthetic construct
  source 1..110: mol_type = other DNA
tggggaggcagagtacaaatcatttaaaatatgatggaaaacatttcttacctaattttgttttagaagactctgagaatgagctggtcttctaatcctaagtaggtggt

SEQ ID NO: 73298 - DNA, 110 bp, synthetic construct
  source 1..110: mol_type = other DNA
atgtctcaaggtagttagttcatacgtctgagtttgtcactggatactcatccttccaaaggtattgagttctatacaacagtcaagttttaagggaaagactttttttt

SEQ ID NO: 73299 - DNA, 110 bp, synthetic construct
  source 1..110: mol_type = other DNA
ttaccaccagtacaatccagctggcattttgccatgtgcaaccataggaaaaaggtcgggatagatggcctggctatttctgcctttccagaaggtaacagaggaagaga

SEQ ID NO: 73300 - DNA, 110 bp, synthetic construct
  source 1..110: mol_type = other DNA
agcttctgaggtgattgcattgcatagagtccacacgtcataaggcagggtaaagcaagactggcagtgttgagtaggcattagaaagatagggagttcccattgtggct

SEQ ID NO: 73301 - DNA, 110 bp, synthetic construct
  source 1..110: mol_type = other DNA
gataccgtccatccccgacagggtgcacatccctggccgctggagctggactccggcaaacatggaatcatgtatggagtagtaaattggtattggatgcattaaaaatg

SEQ ID NO: 73302 - DNA, 110 bp, synthetic construct
  source 1..110: mol_type = other DNA
gaggctccagcccttcaaagtgagaggaagaatcccagtgagcaggaggagcctctaggaataaaaacccagctgctctaggtccaaccctggagaagtcacaccaagtt

SEQ ID NO: 73303 - DNA, 110 bp, synthetic construct
  source 1..110: mol_type = other DNA
ttccagtctacattcaagctactggcacatttgtttattttcaaagctttctctagtcaaatctgtttgctctttcactctccatttttccaagctcttgcaacttaatt

SEQ ID NO: 73304 - DNA, 110 bp, synthetic construct
  source 1..110: mol_type = other DNA
gtcaaatctgtttgctctttcactctccatttttccaagctcttgcaacttaattattttcttcttatagaaacccttaagtctgtaagaaaagctagaattatgtgttc

SEQ ID NO: 73305 - DNA, 110 bp, synthetic construct
  source 1..110: mol_type = other DNA
ttttcgttttgctaaggtggtgtatgacgttgattttggatgctcaatcatccttgcatccttggaacaaatatcaacttattacagtgtatgattcttttaaagtcctg

SEQ ID NO: 73306 - DNA, 110 bp, synthetic construct; identical to SEQ ID NO: 73305
  source 1..110: mol_type = other DNA

SEQ ID NO: 73307 - DNA, 110 bp, synthetic construct
  source 1..110: mol_type = other DNA
ccctgtacccccatcgacatttccaccacagtagcttgctttcatttgtatattaggctagagttctatgtaggacctcttgggacagattctgcaccttaaagatgtac

SEQ ID NO: 73308 - DNA, 110 bp, synthetic construct
  source 1..110: mol_type = other DNA
aggtaggagactctggtactcagattcatcccttcaggacaccaatagatcttagcacaccctcagctactgagaaccactgaaaataaaataggttccttggacagttg

SEQ ID NO: 73309 - DNA, 110 bp, synthetic construct
  source 1..110: mol_type = other DNA
cctgtatccagggtggtaaggaggaggaggaggccccaaaagatggggagatatgcagctggagaacagcccctttatgcccaggaggtaagaggttacagagaaaagcc

SEQ ID NO: 73310 - DNA, 110 bp, synthetic construct
  source 1..110: mol_type = other DNA
ggaaacatggtttagagccagagatcgacttggtttatatataggtttggccattgggtcactaagatttggaataaaggtgctagctatgaagatccttttcatataac

SEQ ID NO: 73311 - DNA, 110 bp, synthetic construct
  source 1..110: mol_type = other DNA
gggtcactaagatttggaataaaggtgctagctatgaagatccttttcatataactatgacctgaactactgcaggatggttgtatttctgtataatgaggctcagagtt

SEQ ID NO: 73312 - DNA, 110 bp, synthetic construct
  source 1..110: mol_type = other DNA
gcctcatggcccaagggactgctctctgtaggagcaaggcatatgctgcaccctaggcccctctctttgatgggcagatgctcgtgggaccactctctgtagctgccagg

SEQ ID NO: 73313 - DNA, 110 bp, synthetic construct
  source 1..110: mol_type = other DNA
ggcccctctctttgatgggcagatgctcgtgggaccactctctgtagctgccagggcaggtaccactcctgtaagtcctctctttgctgggaagctcataggatcactct

SEQ ID NO: 73314 - DNA, 110 bp, synthetic construct
  source 1..110: mol_type = other DNA
tgccttacacgtaaacacagacacacgtaaaaagctatttcagcagtttctgcgtggtgttcagggaggcaaagtgaaaaatagttgatgtatagaaccacccttctctt

SEQ ID NO: 73315 - DNA, 110 bp, synthetic construct
  source 1..110: mol_type = other DNA
atgatgggaactccgagatggctttactttttagttcttgttttctgtcttttggtctgtcttctgtgtcagtagctattggctacaaactacaaactacaagctacaag

SEQ ID NO: 73316 - DNA, 110 bp, synthetic construct
  source 1..110: mol_type = other DNA
tctgtcttctgtgtcagtagctattggctacaaactacaaactacaagctacaagctttaaaacaataactatttattactgctataactatttattactgctcccaaat

SEQ ID NO: 73317 - DNA, 110 bp, synthetic construct
  source 1..110: mol_type = other DNA
aacaatttaaaacattcaaatgtagtactaaccacaagaaaagcgagctgtcactcacaggagatgtttaagcagatgttgttgagtgtccacgtgatggagcctgtata

SEQ ID NO: 73318 - DNA, 110 bp, synthetic construct
  source 1..110: mol_type = other DNA
gctcaacgcagtgggttaaaggatccagagttgccacagtagtggtgaagatcacaggggcagctcagattcagtccttggcctggtggcctgggaacttccatatgctg

SEQ ID NO: 73319 - DNA, 110 bp, synthetic construct
  source 1..110: mol_type = other DNA
ttaaaggatccagagttgccacagtagtggtgaagatcacaggggcagctcagattcagtccttggcctggtggcctgggaacttccatatgctgtgagtgcggccttaa

SEQ ID NO: 73320 - DNA, 110 bp, synthetic construct
  source 1..110: mol_type = other DNA
cacctggtggatatggaatttaaagcacctctcctaccatcttgatgtggcttccttgtcttttgatgcagggtatctttttcgatagctcccaatctattttgttgatg

SEQ ID NO: 73321 - DNA, 110 bp, synthetic construct
  source 1..110: mol_type = other DNA
cacctctcctaccatcttgatgtggcttccttgtcttttgatgcagggtatctttttcgatagctcccaatctattttgttgatggttgttcagaagttggttgtaattt

SEQ ID NO: 73322 - DNA, 110 bp, synthetic construct
  source 1..110: mol_type = other DNA
ctgagcacgcaccatgcagacctgtatctactgggagcataactgaccactgctacaatgctatgttcagaaatccagagctgcacatgctctgaggcatacttcacact

SEQ ID NO: 73323 - DNA, 110 bp, synthetic construct
  source 1..110: mol_type = other DNA
tcttaccaggctgttaaagctttattatagcagactacttccatattgataaattctaacttaggaaatttatgtattatacctcaggttccagtcttattaaaattctc

SEQ ID NO: 73324 - DNA, 110 bp, synthetic construct
  source 1..110: mol_type = other DNA
aaaacttattttccctggccaaaaactagattccaaagcttctccttgattccagctgttagggcaaataaacactgtagtttgtaaattcttagccatcactgcaaaat

SEQ ID NO: 73325 - DNA, 110 bp, synthetic construct
  source 1..110: mol_type = other DNA
ctgttagggcaaataaacactgtagtttgtaaattcttagccatcactgcaaaattctccatgtactcatcctgctgacattggaatggtaggaggttttcataaatttc

SEQ ID NO: 73326 - DNA, 110 bp, synthetic construct
  source 1..110: mol_type = other DNA
atatatgggaagaagcctgaagataaatagctggtatcacaaagaatgatgatggcataactatcattgtacatggtaaacaacaatctgaattaataaaaagaaaaagt

SEQ ID NO: 73327 - DNA, 110 bp, synthetic construct
  source 1..110: mol_type = other DNA
agagaagaatgttgcttcgatttttgtcataaaatttagctcagtgctagatacccagtaggtatttaataagtacttatttaatttattcttgctggcatcttagagat

SEQ ID NO: 73328 - DNA, 110 bp, synthetic construct
  source 1..110: mol_type = other DNA
atcgggaagcaaattgaaatgaaattcgctcttaacaatgaaagttgctctttaatttgaagctgggcatatgtaggttataggagtatagagttttgcataggaatagt

SEQ ID NO: 73329 - DNA, 110 bp, synthetic construct
  source 1..110: mol_type = other DNA
ttggattgtctgctatttccctctccacctcagaagaagtaagtgaaaggaacagtgtattgcatcgtatttggagcagtcactccaagaagaacattttgcatcaagga

SEQ ID NO: 73330 - DNA, 110 bp, synthetic construct
  source 1..110: mol_type = other DNA
gaacacccatctcaacaacagcctttttcttttaatacatgatcttaaacatgcttaagctcatagcatacacatactgtccgaaccctgtttttatcatttatattcac

SEQ ID NO: 73331 - DNA, 110 bp, synthetic construct
  source 1..110: mol_type = other DNA
taagctcatagcatacacatactgtccgaaccctgtttttatcatttatattcacatttcatttatggcttcactttctcttacaactttaattaccccacgaattgtat

SEQ ID NO: 73332 - DNA, 110 bp, synthetic construct
  source 1..110: mol_type = other DNA
cttaagtatcaacctttatgcagacatgaacagctgttctcaaatccactgacacaagcttccccagacccaccaacaaacttcctgaaggtgtggtcatccagtcctag

SEQ ID NO: 73333 - DNA, 110 bp, synthetic construct
  source 1..110: mol_type = other DNA
tctgcatcctcacagatactagtcaaattcgtttccactgtgccaggacaggagctcgggacctagcatttttaaaatatctgctatatatttcattattaatctttaca

SEQ ID NO: 73334 - DNA, 110 bp, synthetic construct; identical to SEQ ID NO: 73333
  source 1..110: mol_type = other DNA

SEQ ID NO: 73335 - DNA, 110 bp, synthetic construct; identical to SEQ ID NO: 73333
  source 1..110: mol_type = other DNA

SEQ ID NO: 73336 - DNA, 110 bp, synthetic construct; identical to SEQ ID NO: 73333
  source 1..110: mol_type = other DNA

SEQ ID NO: 73337 - DNA, 110 bp, synthetic construct
  source 1..110: mol_type = other DNA
gaaaaagttactattactgagctagtcattgcttctacaggtttgcaaagaccaaagctagaaacagattttcaacaaaaatgtatcttagcaagccatactgatacttc

SEQ ID NO: 73338 - DNA, 110 bp, synthetic construct
  source 1..110: mol_type = other DNA
caaagaccaaagctagaaacagattttcaacaaaaatgtatcttagcaagccatactgatacttccattttaaaatcttaaaggagttcccgtcgtggcgcagtggttaa

SEQ ID NO: 73339 - DNA, 110 bp, synthetic construct
  source 1..110: mol_type = other DNA
ttcagtgtggcttctgaatagtttcattccagataggtgcctgttactagacatagggctgcagtcatgaaatgcaagctctgcactcatacacacacagggattccttt

SEQ ID NO: 73340 - DNA, 110 bp, synthetic construct
  source 1..110: mol_type = other DNA
gggctgcagtcatgaaatgcaagctctgcactcatacacacacagggattcctttctcaccacaataaagtagtagagtgagcatcaggcaatggggacagtggcaggca

SEQ ID NO: 73341 - DNA, 110 bp, synthetic construct
  source 1..110: mol_type = other DNA
acacattatatttttggttagggactttaaaaccatgcagtgaaatatttgctgaatatcccatctgcaggatccattatttgtgccttgagtgacgttgtgttcttagt

SEQ ID NO: 73342 - DNA, 110 bp, synthetic construct
  source 1..110: mol_type = other DNA
gttcctgttttacccaagaggcagtgttaggtcactgctccagttgtatgactcgccatctcccttaagaccaaggtagctgtaaatcatgtttctctagaataagggga

SEQ ID NO: 73343 - DNA, 110 bp, synthetic construct
  source 1..110: mol_type = other DNA
gacccagattctcatagattccctgctttacctgggacccagtgtacatgaaaccatgtgtggatgaaaccaagagtagagtctctgtttctcccagtccttcagagctc

SEQ ID NO: 73344 - DNA, 110 bp, synthetic construct
  source 1..110: mol_type = other DNA
atgtgtggatgaaaccaagagtagagtctctgtttctcccagtccttcagagctcctaccctcttgtcctgctgtccttcaacaccagattctcctggggctcctcctct

SEQ ID NO: 73345 - DNA, 110 bp, synthetic construct
  source 1..110: mol_type = other DNA
gaaaaactgaaactcacagtctttgaacccaggctttctgactccaagcttgcgctattgactgaaagttcctctcacaagttacctgactatgcctgttcaaggagaat

SEQ ID NO: 73346 - DNA, 110 bp, synthetic construct
  source 1..110: mol_type = other DNA
tttaacctaagagttttcccttccaactgaaaaaaacattcaaacatcccccttactgactttccttaccctcccacaggatgtgctggagtcagtagctgtgaaggcac

SEQ ID NO: 73347 - DNA, 110 bp, synthetic construct
  source 1..110: mol_type = other DNA
ctgactttccttaccctcccacaggatgtgctggagtcagtagctgtgaaggcaccaacctataggtcagtacttgctttcagactctagatcaatgcttctcaaaccat

SEQ ID NO: 73348 - DNA, 110 bp, synthetic construct
  source 1..110: mol_type = other DNA
tgtagatgattatttttgccaaagcttttttgaattgagattttcactaataagccaagcttctcagtaataatagcttcactaatcttcactcccccagccttttcaat

SEQ ID NO: 73349 - DNA, 110 bp, synthetic construct
  source 1..110: mol_type = other DNA
aaataaacagcccaggaaccaatgaaaacccagaggctactttaaattcagaagcctatttctaactttttttgggccatgcccttggcatgcagaagttctggagtcat

SEQ ID NO: 73350 - DNA, 110 bp, synthetic construct
  source 1..110: mol_type = other DNA
tagcaactttttccattggaggaaatgctggaatagttcaacacagatttcccaaaatcataactgttttatttcgagagttttcattcctccaatctgccttttaaatt

SEQ ID NO: 73351 - DNA, 110 bp, synthetic construct
  source 1..110: mol_type = other DNA
aatcataactgttttatttcgagagttttcattcctccaatctgccttttaaattagccattataaatgggtgatttttctcaccgtatctacagaacacttcaaagtga

SEQ ID NO: 73352 - DNA, 110 bp, synthetic construct
  source 1..110: mol_type = other DNA
gagattttggagtaagcagaaaaatgaattcagtattttaaagtggaaactttagatggtttttcaaattttttccttcactggtagaaagtaattatagtgccacacac

SEQ ID NO: 73353 - DNA, 110 bp, synthetic construct; identical to SEQ ID NO: 73352
  source 1..110: mol_type = other DNA

SEQ ID NO: 73354 - DNA, 110 bp, synthetic construct
  source 1..110: mol_type = other DNA
taagacctttttctctttctgttaagatcctcccttaatattttatttttacccttttaaattatagtgtatcttggtttggatctctttgtgttcaccttgtttggaac

SEQ ID NO: 73355 - DNA, 110 bp, synthetic construct
  source 1..110: mol_type = other DNA
agaaatatttaaaataaagcatgggttgttggtttagctccccgtacacaataaacaaataatagaaagtgagtagtagttaattaatgacacacctgttgaagcagatg

SEQ ID NO: 73356 - DNA, 110 bp, synthetic construct; identical to SEQ ID NO: 73355
  source 1..110: mol_type = other DNA

SEQ ID NO: 73357 - DNA, 110 bp, synthetic construct; identical to SEQ ID NO: 73355
  source 1..110: mol_type = other DNA

SEQ ID NO: 73358 - DNA, 110 bp, synthetic construct; identical to SEQ ID NO: 73355
  source 1..110: mol_type = other DNA

SEQ ID NO: 73359 - DNA, 110 bp, synthetic construct
  source 1..110: mol_type = other DNA
agaatctcagtcttggctaatcaaatggcctcatgataaatcttggagtccctgcatttttctattaaaagcctgtttttgacatggagacctgtttaggatgtatattt

SEQ ID NO: 73360 - DNA, 110 bp, synthetic construct
  source 1..110: mol_type = other DNA
caagcagtcctgcaggcaacaaagtcccccagagcagagggatatagtcctgggatgtgtcagctgtgtcctaggacaggctaaggaaataaggatggtgcaatgatacc

SEQ ID NO: 73361 - DNA, 110 bp, synthetic construct
  source 1..110: mol_type = other DNA
tgtgtcagctgtgtcctaggacaggctaaggaaataaggatggtgcaatgataccattttgttacagggcccaagagtgacttaaaatccaaacagtcaaggaatttttt

SEQ ID NO: 73362 - DNA, 110 bp, synthetic construct
  source 1..110: mol_type = other DNA
tttaccactattaggcttcctgatccatgaacataagacattgttcaatttatttaggtctcctttaatttctttcaacagtgttttttagttttcagtgttcaaagagc

SEQ ID NO: 73363 - DNA, 110 bp, synthetic construct
  source 1..110: mol_type = other DNA
aggtctcctttaatttctttcaacagtgttttttagttttcagtgttcaaagagcttgctcttcctttgtttaatgtattactactttttggggatgctactctaaatga

SEQ ID NO: 73364 - DNA, 110 bp, synthetic construct
  source 1..110: mol_type = other DNA
agtttcctacgtggaattttacatagctgctcttgaggtccttattgtctatgcgtccttttattagtagggatttattggtttcttcttctattggatataaactccac

SEQ ID NO: 73365 - DNA, 110 bp, synthetic construct
  source 1..110: mol_type = other DNA
ccccacttagcataaccatatagctctcggtctacatcaactcaggtacctcctagcctgcttcgtatgtccagacagagtatacgcccacacttttatacacatatgac

SEQ ID NO: 73366 - DNA, 110 bp, synthetic construct
  source 1..110: mol_type = other DNA
gcctgcttcgtatgtccagacagagtatacgcccacacttttatacacatatgacataagctagcacttctgattttattttaactacagagaatatagtttgcaaatat

SEQ ID NO: 73367 - DNA, 110 bp, synthetic construct; identical to SEQ ID NO: 73365
  source 1..110: mol_type = other DNA

SEQ ID NO: 73368 - DNA, 110 bp, synthetic construct; identical to SEQ ID NO: 73366
  source 1..110: mol_type = other DNA

SEQ ID NO: 73369 - DNA, 110 bp, synthetic construct
  source 1..110: mol_type = other DNA
tccctccctctcttccttctttcaaagaatatttagtagctgttatctcaggcatcacagtgaatatctaaaatagtgaacaaagagacatgggactaccctcatgtagc

SEQ ID NO: 73370 - DNA, 110 bp, synthetic construct
  source 1..110: mol_type = other DNA
ctgaagtaatctttaaaaatttcaaatgaggacaaatctggttgtattgactcccacaacaatggctgcttataacatctaggctaaacaccactttctctaaatggcct

SEQ ID NO: 73371 - DNA, 110 bp, synthetic construct
  source 1..110: mol_type = other DNA
cactcagaggtcaggctgtgcctggtgacacatactcgtcctgccaactaatgagtttgaccatatgtatttaaaaagactactcattctccttgcatttgagttactga

SEQ ID NO: 73372 - DNA, 110 bp, synthetic construct
  source 1..110: mol_type = other DNA
gtaagagggtacactcccctgatcttgggagcaagcagccatcaatttccaaattgatactccagctgcctgacacatgccagaagtgtgctttcatcctttcttggaat

SEQ ID NO: 73373 - DNA, 110 bp, synthetic construct
  source 1..110: mol_type = other DNA
gatactccagctgcctgacacatgccagaagtgtgctttcatcctttcttggaatagatgattccaatttttccagcctctctgatggccatttttcacaccagtgctac

SEQ ID NO: 73374 - DNA, 110 bp, synthetic construct
  source 1..110: mol_type = other DNA
ctcacttcctgtcacattcctggcctccacctgctcacagccttctcagaaagcaaactcagcttcctgtggatccctgaatgggtccatgcttctgtgcctttgccagt

SEQ ID NO: 73375 - DNA, 110 bp, synthetic construct
  source 1..110: mol_type = other DNA
aactcagcttcctgtggatccctgaatgggtccatgcttctgtgcctttgccagttctgtttgttcttcctggagattcccatcttttccacctttcccggtgacctctc

SEQ ID NO: 73376 - DNA, 110 bp, synthetic construct
  source 1..110: mol_type = other DNA
tgaatttagcaactgatgattcctccttatctgcccagaggactcacttcatactgcatactaaaaaggacatgggctctagaggcctccctatttttatctgggtcatc

SEQ ID NO: 73377 - DNA, 110 bp, synthetic construct
  source 1..110: mol_type = other DNA
atctactttacatatctgtagatttgactactctgggcatttcatacatggaatcatatagcatgtggtcttctgtgatagacttcttttacttaatgttctcaagcttc

SEQ ID NO: 73378 - DNA, 110 bp, synthetic construct
  source 1..110: mol_type = other DNA
atatagcatgtggtcttctgtgatagacttcttttacttaatgttctcaagcttcatctattttggagcacatatcatgtattcttcttcttatgactgaataatattcc

SEQ ID NO: 73379 - DNA, 110 bp, synthetic construct
  source 1..110: mol_type = other DNA
aagagatttgcagtaaggattagggttagggctatatccagaactcagtcctatctagcagtcgtttttagagaagctggtgggcccaagcatcaggaagctggaggtga

SEQ ID NO: 73380 - DNA, 110 bp, synthetic construct
  source 1..110: mol_type = other DNA
tgtatctagaagtgaactaaacacatggtaaacagagcttgacctgtggatgtcgccatattgactgaagtggaaacctgaggaaattctcagggtgattcacagcaaaa

SEQ ID NO: 73381 - DNA, 110 bp, synthetic construct
  source 1..110: mol_type = other DNA
gcaaaattaaatgacttgtccaaagtcacatagctagttagcatcacagctgagatcaaaccagggggagtctggttccagaacctgtgctaataaccactacactgcct

SEQ ID NO: 73382 - DNA, 110 bp, synthetic construct
  source 1..110: mol_type = other DNA
tcaaaccagggggagtctggttccagaacctgtgctaataaccactacactgcctcccagggctgcaagcctataagcctcttggctgccagcagctgtaggacttattg

SEQ ID NO: 73383 - DNA, 110 bp, synthetic construct
  source 1..110: mol_type = other DNA
tacgggattagtctcggtggagacaacgtgctgtcacatgggcatcactacgtcggagaggagtgagatgggaggctgtggggaggggccggggaagggggtgccgctga

SEQ ID NO: 73384 - DNA, 110 bp, synthetic construct
  source 1..110: mol_type = other DNA
aaaggaaaaatagaaagtacacatagcttaatcacacaagagaaggtaattctttcctgcagccattaaaaggataacagtatttatcataaacaattttatgccagtaa

SEQ ID NO: 73385 - DNA, 110 bp, synthetic construct
  source 1..110: mol_type = other DNA
tctttacctgatccgctgactctgaatgcattttgttgcagaccttggtcattctgaagcccttctttcacttttacaatttaatgattctaaaattcggtctagctgtc

SEQ ID NO: 73386 - DNA, 110 bp, synthetic construct
  source 1..110: mol_type = other DNA
gaagcccttctttcacttttacaatttaatgattctaaaattcggtctagctgtcaatctaagaaatgtattccctagccatattacttagaagcctggacagtttgcgg

SEQ ID NO: 73387 - DNA, 110 bp, synthetic construct; identical to SEQ ID NO: 73385
  source 1..110: mol_type = other DNA

SEQ ID NO: 73388 - DNA, 110 bp, synthetic construct; identical to SEQ ID NO: 73386
  source 1..110: mol_type = other DNA

SEQ ID NO: 73389 - DNA, 110 bp, synthetic construct
  source 1..110: mol_type = other DNA
tctgtcaggccagctgatgtcttcaagggagcgtgataaaccaagctttatgaccttttggttctggggaagatgagcaggttctcccaagatgtccttcccccatgttg

SEQ ID NO: 73390 - DNA, 110 bp, synthetic construct
  source 1..110: mol_type = other DNA
taacagtctcccaaagggttcctatcttgaagctacatctcaaaggaacactcactgaggggtgtacatgtctcacttctagggtgcacttgttctagacctcacataat

SEQ ID NO: 73391 - DNA, 110 bp, synthetic construct
  source 1..110: mol_type = other DNA
tgaggggtgtacatgtctcacttctagggtgcacttgttctagacctcacataatatttaatgcaatagaataggatatactctgtaagaatgtttttatctcactccca

SEQ ID NO: 73392 - DNA, 110 bp, synthetic construct
  source 1..110: mol_type = other DNA
gcatggttgagtgctaatgtgagccctcttcctggttgcaggctgatgacttcctactgtgtcctcacatagtagaagatgaggaagctctcttggggctcttttataaa

SEQ ID NO: 73393 - DNA, 110 bp, synthetic construct
  source 1..110: mol_type = other DNA
tcctaatttgttgcttatgatccgttaggtgttcaaaacattcaaaaggggttaaatcctttacagaacctagagaacaaagtaaatgagttcttcaccagaatataaag

SEQ ID NO: 73394 - DNA, 110 bp, synthetic construct
  source 1..110: mol_type = other DNA
atcctttacagaacctagagaacaaagtaaatgagttcttcaccagaatataaaggcctctgaatgattgtattactctgggatgcttggttgtattatgtatttatgcc

SEQ ID NO: 73395 - DNA, 110 bp, synthetic construct
  source 1..110: mol_type = other DNA
tgcactgcaaggccattctcttcattgtgagatgcacagcgtttaggatattgcagtgtatgcttttttaaaagaccaaaggtagctgaatggttttttaactgagtaca

SEQ ID NO: 73396 - DNA, 110 bp, synthetic construct
  source 1..110: mol_type = other DNA
accttttcaccatcccaggatgattcactgggacagtttatgtccctgttctttttttacctcccattctcctttactgtgattcaagtatgagttcagctttgttactg

SEQ ID NO: 73397 - DNA, 110 bp, synthetic construct
  source 1..110: mol_type = other DNA
tttacctcccattctcctttactgtgattcaagtatgagttcagctttgttactgggggataaaaagagattttgatgtcatgtttgagctacaagtgtggtctaggaaa

SEQ ID NO: 73398 - DNA, 110 bp, synthetic construct
  source 1..110: mol_type = other DNA
ccttttatccatcacttggaagagttaaatggaccagcttctcagaataagtaaccaacattgagcacaaagtgaaaggtctgggtcatgtcaccaaggaagaggcttta

SEQ ID NO: 73399 - DNA, 110 bp, synthetic construct
  source 1..110: mol_type = other DNA
ccgtgtatgctctggccaggggacctcttcatttgctgccctgtgtgctgctcctccagctctttcacagctgggcttctccttgtcatgggagtctcagttcaaatatc

SEQ ID NO: 73400 - DNA, 110 bp, synthetic construct
  source 1..110: mol_type = other DNA
gggttcccagtattgtcagagactgatgagtatccaccactagggctgcaagtagagacagcttctcctggagcacatggatggatgtgtgaaagaaggatggttgccag

SEQ ID NO: 73401 - DNA, 110 bp, synthetic construct
  source 1..110: mol_type = other DNA
ttgggtttctatgggagacttctccagggtacacatgtccagaggagggatggctaggatcacaagacatgccccttttgacatgattagctgtggccgaattatattcc

SEQ ID NO: 73402 - DNA, 110 bp, synthetic construct
  source 1..110: mol_type = other DNA
aggatcacaagacatgccccttttgacatgattagctgtggccgaattatattccaaatcactgtagcactttttgttgcagcttgtgaggtttggttcactgtttattg

SEQ ID NO: 73403 - DNA, 110 bp, synthetic construct; identical to SEQ ID NO: 73401
  source 1..110: mol_type = other DNA

SEQ ID NO: 73404 - DNA, 110 bp, synthetic construct; identical to SEQ ID NO: 73402
  source 1..110: mol_type = other DNA

SEQ ID NO: 73405 - DNA, 110 bp, synthetic construct
  source 1..110: mol_type = other DNA
tgaagctgttggtggatttatcaaacatttgtggctttaagataactacatacgttaatatctggctgttctattgttagatgtttaaaaataccataatgtatgttgat

SEQ ID NO: 73406 - DNA, 110 bp, synthetic construct
  source 1..110: mol_type = other DNA
ggctttcatataaataaattatgcagcatggtttttgtgactggtttctttcacttaagctaatgttttcaagtttcatctgtgttgtagcatatacagtacctcattcc

SEQ ID NO: 73407 - DNA, 110 bp, synthetic construct
  source 1..110: mol_type = other DNA
acctgctgctgcactttttttggcatctggagatccctgcgactcggttgatctttgtgtaggttaggtgactttccagggtgtggggtccctttctccttcacagttcc

SEQ ID NO: 73408 - DNA, 110 bp, synthetic construct; identical to SEQ ID NO: 73407
  source 1..110: mol_type = other DNA

SEQ ID NO: 73409 - DNA, 110 bp, synthetic construct
  source 1..110: mol_type = other DNA
ctgggggacacctggggagtgcactttatacattcaggccactgtcagccatagtcaggcaacctctctgtttctgtctttgaagttccttctctagagttcccttcacc

SEQ ID NO: 73410 - DNA, 110 bp, synthetic construct
  source 1..110: mol_type = other DNA
tttattttccgtaatgaatgttagattgatagtctgtctcagctcccaggcataagttcaaatgggatttacttaataaggaattcattgtagagataatttattgtaga

SEQ ID NO: 73411 - DNA, 110 bp, synthetic construct
  source 1..110: mol_type = other DNA
aacagttgtagtcagagacactaaattccttattatatagtggaaagaacattacattcagtcaggagagctgggttctggctcttaactagagcctgaatgagaaggta

SEQ ID NO: 73412 - DNA, 110 bp, synthetic construct
  source 1..110: mol_type = other DNA
taggtaatatatctgtcgaaaagatcctgctgttctgactgttgatcattttcatccaggcccaagtcagtcctggtcggttatgcatgtctactcctggactgcttctc

SEQ ID NO: 73413 - DNA, 110 bp, synthetic construct
  source 1..110: mol_type = other DNA
ccaggcccaagtcagtcctggtcggttatgcatgtctactcctggactgcttctcccatgctccatttctttctgccagcataaatcaccacagatgggtgacactgtgt

SEQ ID NO: 73414 - DNA, 110 bp, synthetic construct
  source 1..110: mol_type = other DNA
gattcccttcatggtacattgttgtcagcgactgctgtggctaaggacttaaatcttgcagaagtggataatgcacaacattctttgtttcacacagatgaagcacaggg

SEQ ID NO: 73415 - DNA, 110 bp, synthetic construct
  source 1..110: mol_type = other DNA
atccatatccttcactttcaatacactgaaaaaaattggtattacatattcttttgcaagaagtgaagctagaagagtgtaaatagattcacaagtcataaaaacggggc

SEQ ID NO: 73416 - DNA, 110 bp, synthetic construct
  source 1..110: mol_type = other DNA
tctgaatgaggatacctgtagcctgccttttacctgacaatgctatttcctgcaggaaggtaattggctcatgacatcagtcctcttccaggtctcacagaccctgaatt

SEQ ID NO: 73417 - DNA, 110 bp, synthetic construct
  source 1..110: mol_type = other DNA
gagagtgatgaagcatggccctatactcagagatgctctgtgagctccttcacatgctggacaagcaagagaaaggaccaatctgccagaagtttgagagtgtccatgtc

SEQ ID NO: 73418 - DNA, 110 bp, synthetic construct
  source 1..110: mol_type = other DNA
accgaggagacctctaaggttcttggacagttagagctagtaagaggggaaaatctcactggtatcagatagatagccattgataaaagtgggcgatctcacacaattaa

SEQ ID NO: 73419 - DNA, 110 bp, synthetic construct
  source 1..110: mol_type = other DNA
caagttagtattttcttctgctattttggtatagttgatttaaatagtgagctcagttgccacatatagaaggcccaaactgcctgatgtttatttgaacaactgtgagt

SEQ ID NO: 73420 - DNA, 110 bp, synthetic construct
  source 1..110: mol_type = other DNA
ggctttgaaaatgaactgtctacaatctgctagcagctctgccccatttgcctctcagatgccagacactccacattcgtatcaacagttttctaaaagtcattgaggag

SEQ ID NO: 73421 - DNA, 110 bp, synthetic construct
  source 1..110: mol_type = other DNA
gtaaaaggctgatctcatgggagcaaatgagagcaatggagtttacttattgcatggtagttggagggcacatgctaagcactctgaagaatagagagattaatagagtg

SEQ ID NO: 73422 - DNA, 110 bp, synthetic construct
  source 1..110: mol_type = other DNA
caactatatgcttagtcctttgagcctttctagggagtcattgaagctgggtggggtcatggggatcccctttacaggaataaataggaaaaatgaccttttcatatatc

SEQ ID NO: 73423 - DNA, 110 bp, synthetic construct
  source 1..110: mol_type = other DNA
tgtatctctcctagttgacgtgttgaagctctaaccacaaatgtgaatgtattcggacatagggcctttatagagttaattaaggttatatgaagtcaccaaggtatggc

SEQ ID NO: 73424 - DNA, 110 bp, synthetic construct
  source 1..110: mol_type = other DNA
tacgcatggctccgtcatgagcctccacacattgtctctatctcctctcattccggcatcttctctgcttcctttggagttgtatttttgtccatctattcaaggaaagt

SEQ ID NO: 73425 - DNA, 110 bp, synthetic construct
  source 1..110: mol_type = other DNA
tcctagtcggatttgttaaccactgagccatgatgggaactcctcaatggccaattttaatcagctgtatttggtatctgctctttgccccttcacatctatttgccact

SEQ ID NO: 73426 - DNA, 110 bp, synthetic construct
  source 1..110: mol_type = other DNA
ccttgaaagcagaagccatcactgagctggctttgtaatccaacagtgttctttacacagcatccatcttcagctgagtaagtggatgcctgcattgcaatatcattctg

SEQ ID NO: 73427 - DNA, 110 bp, synthetic construct
  source 1..110: mol_type = other DNA
cacagcatccatcttcagctgagtaagtggatgcctgcattgcaatatcattctgtcacttttaagacgttaaataatgagcctatggttaatttcaactataatgagta

SEQ ID NO: 73428 - DNA, 110 bp, synthetic construct
  source 1..110: mol_type = other DNA
gttctccactcaccttcccttgttcttagaggccagaggtgatgacaaaattcgactcttctatcctcacagagcttatgcaatgccagaacaatacaaaaaaaaaaaaa

SEQ ID NO: 73429 - DNA, 110 bp, synthetic construct
  source 1..110: mol_type = other DNA
aaatgttcaagattaaaagcagaccttaagtagtgtaaattctgagatgaccaagcaacttttacagtaacagtagtttgtctttagatgcaagtgctaagaatcacaac

SEQ ID NO: 73430 - DNA, 110 bp, synthetic construct
  source 1..110: mol_type = other DNA
caacttttacagtaacagtagtttgtctttagatgcaagtgctaagaatcacaactcaaatcacctgaaggaaaaacgaaaggaaaataaatttctcggtaactggggaa

SEQ ID NO: 73431 - DNA, 110 bp, synthetic construct
  source 1..110: mol_type = other DNA
agaagaagtattatttctcactcatgatccagtgttacatcttttgtgattcttagtccactgatcttttaaattttgggtagtcaggctttggtacagcttattaaaat

SEQ ID NO: 73432 - DNA, 110 bp, synthetic construct
  source 1..110: mol_type = other DNA
gttctcatttctgcttcttgcacatctttttccgttgtatttcattctacagactggtttctttgcacctcatactatctgacgtacatctctttaaagctcctgagagt

SEQ ID NO: 73433 - DNA, 110 bp, synthetic construct
  source 1..110: mol_type = other DNA
ggtttctttgcacctcatactatctgacgtacatctctttaaagctcctgagagtatttaccaccaatacagttacacaaagagatggcctctgttttggctctctctat

SEQ ID NO: 73434 - DNA, 110 bp, synthetic construct
  source 1..110: mol_type = other DNA
gtaaatgcccacacttactacatttcctaaataagccacattgtcatcacatattacctgtcaacctaagaagcataaaggataagaatatgtttttttatcttatttta

SEQ ID NO: 73435 - DNA, 110 bp, synthetic construct
  source 1..110: mol_type = other DNA
catggactggaaacaaccacaaagtatgaggaactagggcaaaataggggccaaaggaccactacatcactgctcagccaagcaacacagaacacacagttcccagccac

SEQ ID NO: 73436 - DNA, 110 bp, synthetic construct
  source 1..110: mol_type = other DNA
tttgggttgcttgtccctcgtctccgtttttagctgtgtagtagatatttttttggaccaccaacttggtacagttatggtacaaattaataataaaataatttgtgcat

SEQ ID NO: 73437 - DNA, 110 bp, synthetic construct
  source 1..110: mol_type = other DNA
aagtattcattaagcacatgttcacatgagctccttgaataaggagaatttaagtactttttgatgggaaaatattatccttttgctcttttcccttccttctccaagac

SEQ ID NO: 73438 - DNA, 110 bp, synthetic construct
  source 1..110: mol_type = other DNA
cctattgtttctatgtccactcaactctctgtctctaatttttctctctctttgtcactctgggcacataagcacatcacacatttaatcttccatcttcctggaccact

SEQ ID NO: 73439 - DNA, 110 bp, synthetic construct
  source 1..110: mol_type = other DNA
gaaaaacagtgttccttttgtttttcagattttccgaatgtggttattgaaggcgttctccatgggatattttaccctcacctccagcccaggtagaaatcctccacagc

SEQ ID NO: 73440 - DNA, 110 bp, synthetic construct
  source 1..110: mol_type = other DNA
tgtgctgctaaggcctgtgtctgcaaagctccttttggtgggggaggagctaaatctgtgagctcagagcccagcagctagagatgaccacacagtggccattgggctac

SEQ ID NO: 73441 - DNA, 110 bp, synthetic construct
  source 1..110: mol_type = other DNA
cacagagtcatttggtgaattctgaactccagtgccccaatgtgaagtctttcagatctcccccgtttctccttgtcgtggaagtaggaagctatctgtgctgctgtgtg

SEQ ID NO: 73442 - DNA, 110 bp, synthetic construct
  source 1..110: mol_type = other DNA
atctcccccgtttctccttgtcgtggaagtaggaagctatctgtgctgctgtgtgactgtttctgatggaaaatattttctccaggagactggaatgtgttctgcttttc

SEQ ID NO: 73443 - DNA, 110 bp, synthetic construct
  source 1..110: mol_type = other DNA
ccatggcccttaattttcctcattggtaaattgaattattacagggacaagtataagggattataaagccttgagctttgtctattaatatattaaggactttatgcctt

SEQ ID NO: 73444 - DNA, 110 bp, synthetic construct
  source 1..110: mol_type = other DNA
atggcaatgctggatccttaatcaatgagagaggtcagggattgaacccacatcctcataaatgctagttggtttcattagctactgcgtgatgatgggaattcccctct

SEQ ID NO: 73445 - DNA, 110 bp, synthetic construct
  source 1..110: mol_type = other DNA
tcataaatgctagttggtttcattagctactgcgtgatgatgggaattcccctctgttaacaattattgtcttttttttttttttttggtctttttagggccacacccat

SEQ ID NO: 73446 - DNA, 110 bp, synthetic construct
  source 1..110: mol_type = other DNA
ggaatgactgaagactgacttctcctttagtgcccagaatctataccgactgcacaaaagtttttacgctactgaattttcaatctttgggagctaagtgtttgtttgtt

SEQ ID NO: 73447 - DNA, 110 bp, synthetic construct
  source 1..110: mol_type = other DNA
aaaagtttttacgctactgaattttcaatctttgggagctaagtgtttgtttgtttgtttgtttgttttggtgtagctctgagagtccttgtcaatatcttggctaaggt

SEQ ID NO: 73448 - DNA, 110 bp, synthetic construct
  source 1..110: mol_type = other DNA
tttctcattattatcttatttttcattctttgggattgatttggggcttggctagcagtcaagagctggagaacatgaggttcgcaaatgcagctatttctagcaggctg

SEQ ID NO: 73449 - DNA, 110 bp, synthetic construct
  source 1..110: mol_type = other DNA
ctactgtgcctggaagatgtcaggtagaattaatggatgggacaatggcatgccctctggtgcaaggaataggagctcagaatcattgaatttaaatgtttaaattttac

SEQ ID NO: 73450 - DNA, 110 bp, synthetic construct
  source 1..110: mol_type = other DNA
gccttccttgcctctggagcaatgacctcaccacccggatgccactagccccagggtcatcatagcatttattcagggcaggcggaactagtcacctggtctctcaaagc

SEQ ID NO: 73451 - DNA, 110 bp, synthetic construct
  source 1..110: mol_type = other DNA
gtcatcatagcatttattcagggcaggcggaactagtcacctggtctctcaaagcttagacaagcctggcaatctagctctctctcaggtctttcaagtctcactgagca

SEQ ID NO: 73452 - DNA, 110 bp, synthetic construct
  source 1..110: mol_type = other DNA
tcctgctctcaggctgctgggcaggattcctctggggaagctagaatgtagtagagaggggaatgataagcatatcctgaaaaatcacaggtaaatgcgcatttatttat

SEQ ID NO: 73453 - DNA, 110 bp, synthetic construct
  source 1..110: mol_type = other DNA
aagcttgtattgacaccaacagtgctgtctgtgagaacacctgtcccaccatacctttgccatcctgattagaaaaagggaagattccctagggacaacttggaccaaag

SEQ ID NO: 73454 - DNA, 110 bp, synthetic construct
  source 1..110: mol_type = other DNA
atttattcccactcgaactcaaaattgaagtagaagtgacaaaatgtcacaccgaaagctcgactggaattattctccgagggggttgcagcaaagcatgttgttttgtg

SEQ ID NO: 73455 - DNA, 110 bp, synthetic construct
  source 1..110: mol_type = other DNA
ctcctaagctctaatcctaaatcaccttgagaacgtttatctctctggaggaaggtgctgtcactccaggatttccaagaacattctcacccgtgactttttttacatca

SEQ ID NO: 73456 - DNA, 110 bp, synthetic construct
  source 1..110: mol_type = other DNA
tgctgtcactccaggatttccaagaacattctcacccgtgactttttttacatcattagaatgcaatttgtttgtgtattcatttggtcatttatttgctcgctgatgta

SEQ ID NO: 73457 - DNA, 110 bp, synthetic construct
  source 1..110: mol_type = other DNA
gaactgctctcttggaaggtacattaaatctttcatgtctccaaagtatcacttgatgtttttcagtaagaatttatctaatagtgggctggtgacataaacgtataata

SEQ ID NO: 73458 - DNA, 110 bp, synthetic construct
  source 1..110: mol_type = other DNA
agaaatcctggaatgagcccagcgtttagaggcagtttctcctcaggatagctgccagttctggtacaggcaagtgaaaggctaagaatctgtgaccaaattgcaaagct

SEQ ID NO: 73459 - DNA, 110 bp, synthetic construct
  source 1..110: mol_type = other DNA
taactggtagctgttattgctctgatttcataatctcttggaaacttctactcgctaactatgacatataaactaatgaccacctactcttttatttccaacccaaactc

SEQ ID NO: 73460 - DNA, 110 bp, synthetic construct
  source 1..110: mol_type = other DNA
tcacgttgcctttctatgcagctgtgaaacatgaacccactttattcaagggactttgactgttacatcatcccttccatttaaatcactgcagcggaagaaactggtgg

SEQ ID NO: 73461 - DNA, 110 bp, synthetic construct
  source 1..110: mol_type = other DNA
acatcttgtttcaaatagaaaggaagtgctaaaagaacagggacacatccaaacaacacagaaggcagcttgaagggaatcctgctggtcaaatcaggaacatcgaaatg

SEQ ID NO: 73462 - DNA, 110 bp, synthetic construct
  source 1..110: mol_type = other DNA
aacgcttagattctctcctctcacccttcgtgctgacacaggcttctgagagaagaggttcagatgctgtataggttgcttggccagagaggcccctgctgttgttctgt

SEQ ID NO: 73463 - DNA, 110 bp, synthetic construct
  source 1..110: mol_type = other DNA
agaatagagaagctgagggactaggatcaccacattgctcaacagaacgagggacgtgagcaagctgcagttatgagagagcagagactgtgagtaaagcaggggctggt

SEQ ID NO: 73464 - DNA, 110 bp, synthetic construct
  source 1..110: mol_type = other DNA
gctatgagaagattctgcaccatggcagtagaattttatcttctttctttcagtaatctataccaacaatattttccattatttagatcattatttgactttaagcttca

SEQ ID NO: 73465 - DNA, 110 bp, synthetic construct
  source 1..110: mol_type = other DNA
tttgtacttgctcattgtgatttatttcagtccagaaatagcttttgtaacacaccttcaagccacaaacatttgtatctgcataaaaaagttctagaagaagatgcgca

SEQ ID NO: 73466 - DNA, 110 bp, synthetic construct
  source 1..110: mol_type = other DNA
gagctgaaggaaaaatgatttggtcttatgccttgcattagctctccagagatctttgtatttatttggaaagaatgtgttgatggtgatcaggacagtaatgtgtagga

SEQ ID NO: 73467 - DNA, 110 bp, synthetic construct
  source 1..110: mol_type = other DNA
caggaaacagcggctcaggtgatgatactctatgactaagtgcttggtatgaaaccttaggaaatgtaagttgatatgaaataagttgtaccttgacctaagaggttgga

SEQ ID NO: 73468 - DNA, 110 bp, synthetic construct
  source 1..110: mol_type = other DNA
ggatgatttttctcccaggtctcttcttcatgttccttaagtttccttcacttttttcaccagtttatgcactgcatggcaggagagtcacttgcctccatcttccagct

SEQ ID NO: 73469 - DNA, 110 bp, synthetic construct
  source 1..110: mol_type = other DNA
ttcaccagtttatgcactgcatggcaggagagtcacttgcctccatcttccagctgattatctgactgttctgctgggtgcattttgctatttggactatcatatgttga

SEQ ID NO: 73470 - DNA, 110 bp, synthetic construct
  source 1..110: mol_type = other DNA
ttttcaccttcagggatacctccatgatgcactcaaggctgcctactccataacttaatagctgggatcagtcatttccaaactactcatacttatctgcccagcaagtg

SEQ ID NO: 73471 - DNA, 110 bp, synthetic construct
  source 1..110: mol_type = other DNA
gcatctgcataacctttgggattgcttcatactatatggcccaacatttaaaagttactaaaaatgttaacctaacagtcacattcaaacttacctattttctgtatata

SEQ ID NO: 73472 - DNA, 110 bp, synthetic construct
  source 1..110: mol_type = other DNA
ggggtattgacacactgagcatttatgctgcactggtgggttccattagaacattcatccagatctgcatgtcaagagaacatatcaataaagttcagacacgaaaatgt

SEQ ID NO: 73473 - DNA, 110 bp, synthetic construct
  source 1..110: mol_type = other DNA
catccagatctgcatgtcaagagaacatatcaataaagttcagacacgaaaatgtaatatttaaacacccagaactatctttacctgtcccaatttaaatgtatactggc

SEQ ID NO: 73474 - DNA, 110 bp, synthetic construct; identical to SEQ ID NO: 73472
  source 1..110: mol_type = other DNA

SEQ ID NO: 73475 - DNA, 110 bp, synthetic construct; identical to SEQ ID NO: 73473
  source 1..110: mol_type = other DNA

SEQ ID NO: 73476 - DNA, 110 bp, synthetic construct
  source 1..110: mol_type = other DNA
cagtgcagtccacttatttattaaatggcattgattttaccagatgaagttacgtgaaataattatatcgctttcctaattacgctaactttttctgctcaccagtcact

SEQ ID NO: 73477 - DNA, 110 bp, synthetic construct
  source 1..110: mol_type = other DNA
gaaataattatatcgctttcctaattacgctaactttttctgctcaccagtcactgatcttctgttaatgtctctttttttaactgactcttttacctggaaagactcgt

SEQ ID NO: 73478 - DNA, 110 bp, synthetic construct
  source 1..110: mol_type = other DNA
ctgcaccagctcaaactgaaagtaacaaatgccaaacccatagatgaaatctggaggtcagcagttggatagcgattgatggacaacagtccatcagcacaccctctggt

SEQ ID NO: 73479 - DNA, 110 bp, synthetic construct
  source 1..110: mol_type = other DNA
ggtcagcagttggatagcgattgatggacaacagtccatcagcacaccctctggtaccttcctccacgatggagaaccagtactcaaaacatcctgtggtccagtgttgt

SEQ ID NO: 73480 - DNA, 110 bp, synthetic construct; identical to SEQ ID NO: 73478
  source 1..110: mol_type = other DNA

SEQ ID NO: 73481 - DNA, 110 bp, synthetic construct; identical to SEQ ID NO: 73479
  source 1..110: mol_type = other DNA

SEQ ID NO: 73482 - DNA, 110 bp, synthetic construct
  source 1..110: mol_type = other DNA
caagcagtcgcactgcagctagactctcatggagaccacatcaggcttagctccttctggtctaactgcttcccttactccctttttttctaaggatgctccctcagtta

SEQ ID NO: 73483 - DNA, 110 bp, synthetic construct
  source 1..110: mol_type = other DNA
tctggtctaactgcttcccttactccctttttttctaaggatgctccctcagttaagacataagcacctgaacctgcctctgggcaacccaacccaagacagcggtgaat

SEQ ID NO: 73484 - DNA, 110 bp, synthetic construct
  source 1..110: mol_type = other DNA
atgagaaaagtaagaaaaacatctctggaactattccagccatctttgcatgtcgcagatgaactgtgcaatactgtgggagaaatttgaacttacaccacgaggaagtg

SEQ ID NO: 73485 - DNA, 110 bp, synthetic construct
  source 1..110: mol_type = other DNA
ttgatttttgtttcatgaatgtgaaaattcttgtggaattgttactgatgtgctgcatcctttggaaatcaaccagaatcttctcaggtagctgtttggtcttaaagtag

SEQ ID NO: 73486 - DNA, 110 bp, synthetic construct
  source 1..110: mol_type = other DNA
catcctttggaaatcaaccagaatcttctcaggtagctgtttggtcttaaagtagcagtttttaaagctgagggttctttaagagttgtataatttaaatgcctttcttt

SEQ ID NO: 73487 - DNA, 110 bp, synthetic construct; identical to SEQ ID NO: 73485
  source 1..110: mol_type = other DNA

SEQ ID NO: 73488 - DNA, 110 bp, synthetic construct; identical to SEQ ID NO: 73486
  source 1..110: mol_type = other DNA

SEQ ID NO: 73489 - DNA, 110 bp, synthetic construct
  source 1..110: mol_type = other DNA
gcagtacagtattgctcactgcattcactgtgctgtgcattatgtccccagaatttgtctgtagaattttgtaccttttgacccctgtcactcttttctaccaccttcag

SEQ ID NO: 73490 - DNA, 110 bp, synthetic construct
  source 1..110: mol_type = other DNA
cttcctcctacctaatactgagatttacataattgagttcttccctttttacattcgtgctagagctttagtgtaaaaactgaagctgaattactatgctaatctttgca

SEQ ID NO: 73491 - DNA, 110 bp, synthetic construct
  source 1..110: mol_type = other DNA
cgccacgatgggaactccaagattatcacttcttaaagaatcatatatcattcatctttataccatccagtacttgctgtatagagcttgaaatatattgtgcattcaat

SEQ ID NO: 73492 - DNA, 110 bp, synthetic construct
  source 1..110: mol_type = other DNA
ggagttctcttatggcacagtgggttaaggatccagcattgtcactgaagtggctttggtcactgctagggtagggctttgactcctgactggggaacttcctaggatga

SEQ ID NO: 73493 - DNA, 110 bp, synthetic construct
  source 1..110: mol_type = other DNA
ttggtcactgctagggtagggctttgactcctgactggggaacttcctaggatgatgttaatggcaacgaccaaaaaagggtttttcagagagcaagaatcaaaatattt

SEQ ID NO: 73494 - DNA, 110 bp, synthetic construct
  source 1..110: mol_type = other DNA
aggggctcagacactacctgatcctccaggtcccttagctggcccgaacctgaaaacgcagtctgactcagctctcaggagctgcttcaccattgagcctccttatatcc

SEQ ID NO: 73495 - DNA, 110 bp, synthetic construct
  source 1..110: mol_type = other DNA
agccttagctaaatttatcaaacaagctgttaatggtaactagcaaagtctaatattattaaacactaatgagaaaggctgtattacagaactggatggccctagacatc

SEQ ID NO: 73496 - DNA, 110 bp, synthetic construct
  source 1..110: mol_type = other DNA
ttttcccatttatctgcgtggctggctcccttacttttatgtctttgctcaaacggcagctgattagtaaatccttccttgaggaccctatttaaagttgtatcctgttc

SEQ ID NO: 73497 - DNA, 110 bp, synthetic construct
  source 1..110: mol_type = other DNA
tgaaaatactcagtaaataatggatgtgggggaacatgtactgatgtgtactgttgatgtgactggaaagggggcagctttttaaaatgtatctagactttgtccgagca

SEQ ID NO: 73498 - DNA, 110 bp, synthetic construct
  source 1..110: mol_type = other DNA
acgcccccggcccgcagttactcctgtcactcagcactccccaacctgctagctgccatggccatctcttcgtcttcctttatggagggtagggacagcagtctccccag

SEQ ID NO: 73499 - DNA, 110 bp, synthetic construct
  source 1..110: mol_type = other DNA
ccatggccatctcttcgtcttcctttatggagggtagggacagcagtctccccaggcccggtgagggggtcacctgggcacctgcctcctccttaagagtggaggccagg

SEQ ID NO: 73500 - DNA, 110 bp, synthetic construct
  source 1..110: mol_type = other DNA
tttttgacagccccaaggcatatggtgttcccagaccaaggatcagatccacgctgcagttttgacttaagccacagctggggcaatgcaggatcctaacccactgtgcg

SEQ ID NO: 73501 - DNA, 110 bp, synthetic construct
  source 1..110: mol_type = other DNA
gatccacgctgcagttttgacttaagccacagctggggcaatgcaggatcctaacccactgtgcggagctggggatggaacctgtgtccaagtgctcccaagatgctgct

SEQ ID NO: 73502 - DNA, 110 bp, synthetic construct
  source 1..110: mol_type = other DNA
tccttgctccaaactgacctctttgccatagaaaatgtttcttgtctgatagcggagatggggccagaaggagaactgagtagcctcattgccacctttctccagccatc

SEQ ID NO: 73503 - DNA, 110 bp, synthetic construct
  source 1..110: mol_type = other DNA
ccagcgtgtgcggcttctcttctctccccggtgcatctcacccgcctgaccctcgcagggtcggtaagtgtgtgatttctttctctgccatgtctttgccctgatcgggc

SEQ ID NO: 73504 - DNA, 110 bp, synthetic construct
  source 1..110: mol_type = other DNA
cagggtcggtaagtgtgtgatttctttctctgccatgtctttgccctgatcgggctgagagcttctccagcctggagaagcctttgctgcgttgagttcgcttctcacat

SEQ ID NO: 73505 - DNA, 110 bp, synthetic construct
  source 1..110: mol_type = other DNA
tgcagggccagcactcctgtgtcttgtgccattggcaggcctgtccccacgtgggggatggagagagccaggcccagagaggcacagtggcaggaccaacaccctgcagt

SEQ ID NO: 73506 - DNA, 110 bp, synthetic construct
  source 1..110: mol_type = other DNA
ggatggagagagccaggcccagagaggcacagtggcaggaccaacaccctgcagttctgcacgctgctgtccacttcttagcatctgtgtggatggggttggagagagag

SEQ ID NO: 73507 - DNA, 110 bp, synthetic construct
  source 1..110: mol_type = other DNA
tttttccacaaaaaaaaaaaatagcctatgtttgtagctgattagttatttgagactgttgcctacccacagaagttacagcattcacaggcttcttcatcttatactgt

SEQ ID NO: 73508 - DNA, 110 bp, synthetic construct
  source 1..110: mol_type = other DNA
acaaagctttttattgtaacaacgcttataatagatacaatgtgttaatggccttaaagtccagcaatagggtccaataatacatggtatatgcaaatatagtaccatgc

SEQ ID NO: 73509 - DNA, 110 bp, synthetic construct; identical to SEQ ID NO: 73508
  source 1..110: mol_type = other DNA

SEQ ID NO: 73510 - DNA, 110 bp, synthetic construct
  source 1..110: mol_type = other DNA
caaaatggtttaaggtaagaaacgctccatcatcattttctgtgtaattttgaagttgggtggattctgaagctctcctgacggggcttttctcccagactgttggcaga

SEQ ID NO: 73511 - DNA, 110 bp, synthetic construct
  source 1..110: mol_type = other DNA
ttgggtggattctgaagctctcctgacggggcttttctcccagactgttggcagactttgacagagcgccacctactgcccgagtcttgccacctccgcgccccagctcc

SEQ ID NO: 73512 - DNA, 110 bp, synthetic construct
  source 1..110: mol_type = other DNA
tcctgaatcctactagaaatatagctaattcttacaattcttttggtttaagttaaattatactctgtgtagttggagctcttggaggtgcatttttgtggccacaacac

SEQ ID NO: 73513 - DNA, 110 bp, synthetic construct
  source 1..110: mol_type = other DNA
aattatactctgtgtagttggagctcttggaggtgcatttttgtggccacaacacacacacagattagcactcagccagagattggaggggaatccatgcatgtctaagt

SEQ ID NO: 73514 - DNA, 110 bp, synthetic construct; identical to SEQ ID NO: 73512
  source 1..110: mol_type = other DNA

SEQ ID NO: 73515 - DNA, 110 bp, synthetic construct; identical to SEQ ID NO: 73513
  source 1..110: mol_type = other DNA

SEQ ID NO: 73516 - DNA, 110 bp, synthetic construct
  source 1..110: mol_type = other DNA
ggctctggaacccatcagtcgtgccccggaaactgaaggacatgaagatggaatccagctggaattggaccctggtgggacccaggatgccagttcagcagcttctggcc

SEQ ID NO: 73517 - DNA, 110 bp, synthetic construct
  source 1..110: mol_type = other DNA
aagatccttgtctgtcttcaattctggaaaattctctcatttggccacagcataaggaagctcctgggccaggaatcaaacccatgccacagcagtaacccaagttgctg

SEQ ID NO: 73518 - DNA, 110 bp, synthetic construct
  source 1..110: mol_type = other DNA
taagacgtcagtcttcagagggcttagggtaaatggagccgtctcaactaagtcgggattctacacaagttttggactagaattaacctctgctttaaccccagctcgtg

SEQ ID NO: 73519 - DNA, 110 bp, synthetic construct
  source 1..110: mol_type = other DNA
tatttttctaattcctaagaaggtaacatgatgactactaaatcaatactagaggtagattatcttgtgtggcatttgtgcttaccagtagttaaactgagaaaaacaaa

SEQ ID NO: 73520 - DNA, 110 bp, synthetic construct
  source 1..110: mol_type = other DNA
ccagctgcagaactttgaggtgccattgcagggggctgggcacagaatcatcctcttaaaaggtaccgtgagattctgattgttctgttgtgccaggactggatggggcg

SEQ ID NO: 73521 - DNA, 110 bp, synthetic construct
  source 1..110: mol_type = other DNA
ttaaaaggtaccgtgagattctgattgttctgttgtgccaggactggatggggcgagagggggttacaatgatcagtgtacagacctggcggttacagtggtcagtccag

SEQ ID NO: 73522 - DNA, 110 bp, synthetic construct
  source 1..110: mol_type = other DNA
tgactggctgaaggtttttgtggtgtggtgtgtgtgtgtgtatgtgtgttgtagtatatactttaactgtccaaacagtcctaattttgggcagctggacctgctggggc

SEQ ID NO: 73523 - DNA, 110 bp, synthetic construct
  source 1..110: mol_type = other DNA
atatactttaactgtccaaacagtcctaattttgggcagctggacctgctggggcaaaagtcacgtaaggaaagttgtaaggactggatcaggctttggaagatgggttt

SEQ ID NO: 73524 - DNA, 110 bp, synthetic construct
  source 1..110: mol_type = other DNA
ttcagaaatgccccagtggacaatcagctatttccaagggctctgattcactagccagggagagcctaatacagtgtctctgcctcggcctggggaggactcccccttct

SEQ ID NO: 73525 - DNA, 110 bp, synthetic construct
  source 1..110: mol_type = other DNA
cagggagagcctaatacagtgtctctgcctcggcctggggaggactcccccttctttctaggggaatgggctttctggagaaacagagatgcttcatggccttgctgaag

SEQ ID NO: 73526 - DNA, 110 bp, synthetic construct
  source 1..110: mol_type = other DNA
tctagcctctcagagttccccggtagctcagcaggttaagaatctggcatcactgcatagctcggatcattgctgtggtactgggtttgaaccctggcctgggcaaggcc

SEQ ID NO: 73527 - DNA, 110 bp, synthetic construct
  source 1..110: mol_type = other DNA
catagctcggatcattgctgtggtactgggtttgaaccctggcctgggcaaggccaaaaaaacaaaaataaaatctagcctctctaccacctgccaacccatgcaccctg

SEQ ID NO: 73528 - DNA, 110 bp, synthetic construct
  source 1..110: mol_type = other DNA
gaggccagggattgaacctacatcctcatggataccacttggattcatttctgttacgccacaacaggaactctttgtgtgtatgcactcaggctcaatttgtgtccgtc

SEQ ID NO: 73529 - DNA, 110 bp, synthetic construct
  source 1..110: mol_type = other DNA
acgccacaacaggaactctttgtgtgtatgcactcaggctcaatttgtgtccgtcaatagtggggcagagcagtgggggggctcgcttcgtggatgggtgggagaggccc

SEQ ID NO: 73530 - DNA, 110 bp, synthetic construct
  source 1..110: mol_type = other DNA
cggaggacaggtgttagagaaaagagctattttaatttaggctttatgattaacaattgatagtgcatataaacccggctacggagggccaacgtggtggttctgataga

SEQ ID NO: 73531 - DNA, 110 bp, synthetic construct
  source 1..110: mol_type = other DNA
attgatagtgcatataaacccggctacggagggccaacgtggtggttctgatagatgaaggagggctcttcagagaagaccctgcatgagacaggcttaggaagacaaat

SEQ ID NO: 73532 - DNA, 110 bp, synthetic construct
  source 1..110: mol_type = other DNA
gcatggtttcattgtttagctgtattttataatttgaataaccgttgcagagtagaggtcattagtataaaattcagttgttctacttcaagttttcaagtgccagcagt

SEQ ID NO: 73533 - DNA, 110 bp, synthetic construct
  source 1..110: mol_type = other DNA
taaaaagagatggtggagcttcaggagatacaggccttggcctgctgccgcctgaagagcaaaactggtgagtgtgaagcagagactaaagcagctctgtcatgacttgg

SEQ ID NO: 73534 - DNA, 110 bp, synthetic construct
  source 1..110: mol_type = other DNA
agagcaaaactggtgagtgtgaagcagagactaaagcagctctgtcatgacttggcccttatgagctgagaacatatcaggatgtccaagctgaccgtcctcagtcaggt

SEQ ID NO: 73535 - DNA, 110 bp, synthetic construct
  source 1..110: mol_type = other DNA
tgttgttttttttttttcccctcgggcagaaatatctaagctctttggcttaatcatctcttttatatgatttgtgcaaattccgtgtgaagccagggaacaaacaaaac

SEQ ID NO: 73536 - DNA, 110 bp, synthetic construct
  source 1..110: mol_type = other DNA
ggtggctgtaccaggacagaaatccagagaaaaattgactgtgatgttgaaaagcagctgttagtatgataatactaataccaacaataactgaacaaaattaaataaaa

SEQ ID NO: 73537 - DNA, 110 bp, synthetic construct
  source 1..110: mol_type = other DNA
aagccaagagtcatgaactgaggaaactgagcaagtctggtgattagaaggcaagataaagcccccaactatccacccaaagtgtctcttctcttagcagctgtggatct

SEQ ID NO: 73538 - DNA, 110 bp, synthetic construct
  source 1..110: mol_type = other DNA
ataaagcccccaactatccacccaaagtgtctcttctcttagcagctgtggatctgatggcttctaaaggctccttagagaaaagtggaaacacacgcttgtgttatgct

SEQ ID NO: 73539 - DNA, 110 bp, synthetic construct
  source 1..110: mol_type = other DNA
ccagcttcctggaggagccctgcctcaggtaaaatgaggcatttctttcacaaaacactggtccctaattgaataaccattgctgtgctcaatactacaagagacgtgga

SEQ ID NO: 73540 - DNA, 110 bp, synthetic construct
  source 1..110: mol_type = other DNA
cactggtccctaattgaataaccattgctgtgctcaatactacaagagacgtggatggtttaattagttttttaaataagtggcaagaaatggtacttacccaacaggct

SEQ ID NO: 73541 - DNA, 110 bp, synthetic construct
  source 1..110: mol_type = other DNA
gagactgggctctgagcctggagcaaaaggaccctcagttctgattggcttcccgctgaagtgggcccgccccgcaatctaaagaggcgggaaggacggtgttaacagca

SEQ ID NO: 73542 - DNA, 110 bp, synthetic construct
  source 1..110: mol_type = other DNA
ctccagggtttgcaaaagctgtctagtttataagatgacccacaacttgcttcatgaaaactgacaaccagctgtgaaaattacacagccccccagagaagctggaggac

SEQ ID NO: 73543 - DNA, 110 bp, synthetic construct
  source 1..110: mol_type = other DNA
cccagggcctgggatggaacaagctcaggtgtcccactgagaatggaggagccgctggtggtctcaaagtcctcgcgcaattcagggccaaacccatctgcattagcaga

SEQ ID NO: 73544 - DNA, 110 bp, synthetic construct
  source 1..110: mol_type = other DNA
gtgatcacagggaagtaactacctcttgaatattatgtgtgccctcactattcacactaatacttaggacaatcgggcgctatatgtgcatttcagaggtcaagctacct

SEQ ID NO: 73545 - DNA, 110 bp, synthetic construct
  source 1..110: mol_type = other DNA
actaatacttaggacaatcgggcgctatatgtgcatttcagaggtcaagctacctcttgagtggctaatctcaccgtctgcgaccaaagcccggagctccaaggcaatgg

SEQ ID NO: 73546 - DNA, 110 bp, synthetic construct
  source 1..110: mol_type = other DNA
tcagaagtggtccaaagccacagaagccctagtcctgaatctagttccgactccagctatggcagcataatgcctcacgactgggtgacacttagaatggcaaaagacag

SEQ ID NO: 73547 - DNA, 110 bp, synthetic construct
  source 1..110: mol_type = other DNA
agcctttcttctgattatttttacctcaaaaaagttgtgaattgacggtagtttgtaatgcaggtgcttacccgtaaggggcttgacattctgacaggcgggaggggatg

SEQ ID NO: 73548 - DNA, 110 bp, synthetic construct
  source 1..110: mol_type = other DNA
gatctataacttaaaattctgtcttatattttcctttctaggtaagtggactgccagctcctgatgtgtcttggtatctaaatggaagaccagttcaatcagatgatctt

SEQ ID NO: 73549 - DNA, 110 bp, synthetic construct
  source 1..110: mol_type = other DNA
ctttgccactgatgctccgagctggggaacggcacttgcctcacctgtctacctttcacatgcctccaggtaccatcaaggacggggggatcctgccccggtccctgact

SEQ ID NO: 73550 - DNA, 110 bp, synthetic construct
  source 1..110: mol_type = other DNA
tcacatgcctccaggtaccatcaaggacggggggatcctgccccggtccctgactctcatcttcaatagcctccagggccaacttcatccaacacctgatctgaagccct

SEQ ID NO: 73551 - DNA, 110 bp, synthetic construct
  source 1..110: mol_type = other DNA
gggtgtgtctgtgtgtgtgtgtgtgcgcgcgtgtgtgtgtctctttctggatctagggctggggattcagagcaaaggcctttccctccagcagttactccctccgccct

SEQ ID NO: 73552 - DNA, 110 bp, synthetic construct; identical to SEQ ID NO: 73551
  source 1..110: mol_type = other DNA

SEQ ID NO: 73553 - DNA, 110 bp, synthetic construct
  source 1..110: mol_type = other DNA
attgacgacttcttggcggtctcaggtaatgagctggttccccagaggaatctgcggggatgtgcctaattagtttcgcccaagttacactaagggacaatgaaaacacc

SEQ ID NO: 73554 - DNA, 110 bp, synthetic construct
  source 1..110: mol_type = other DNA
aaatggggggatgtgaccaatgccattcctaccccaggagagaagagaacagatgttcaagaaggtagctgagcacatgagcaagaaactgcaatctcagaaacaaaaga

SEQ ID NO: 73555 - DNA, 110 bp, synthetic construct
  source 1..110: mol_type = other DNA
aatagagaatgggctatgaagttgagagccagagcttaccttgtgactgagaaactaagaattattaaaagtttcactttcagtctctgggctttttaacatcagtttta

SEQ ID NO: 73556 - DNA, 110 bp, synthetic construct
  source 1..110: mol_type = other DNA
gagccagagcttaccttgtgactgagaaactaagaattattaaaagtttcactttcagtctctgggctttttaacatcagttttaaaaagtagaatttgcttttcataaa

SEQ ID NO: 73557 - DNA, 110 bp, synthetic construct
  source 1..110: mol_type = other DNA
attgcggtttattttatggcctaacatatggcctattctggataatgttccatgtatacttgagaagaatgtatattctcctgctgctggatagaatgttctaaggatgt

SEQ ID NO: 73558 - DNA, 110 bp, synthetic construct
  source 1..110: mol_type = other DNA
atacttgagaagaatgtatattctcctgctgctggatagaatgttctaaggatgtctgttatgttaagctggttttccctgcctctcttacaacagaagcagggcaggtg

SEQ ID NO: 73559 - DNA, 110 bp, synthetic construct
  source 1..110: mol_type = other DNA
aaataatccagatgtcctctattagggagttggttatacaaatatggaaggctatgcagctcttaaaaagcataaaataggtctctgtatattgacatggaaatatgttc

SEQ ID NO: 73560 - DNA, 110 bp, synthetic construct
  source 1..110: mol_type = other DNA
gccacctctgacctggccctggacagcctcgagacgggagttgatcctgcaagtctgggcgctatctttaccgcgggcgggaggcaggaaagatgaaagagaaagcctcg

SEQ ID NO: 73561 - DNA, 110 bp, synthetic construct
  source 1..110: mol_type = other DNA
tgggcgctatctttaccgcgggcgggaggcaggaaagatgaaagagaaagcctcgcaaggatttctttgcgcgcattcagatgagatgtgtccagagctctcagctagtg

SEQ ID NO: 73562 - DNA, 110 bp, synthetic construct
  source 1..110: mol_type = other DNA
acagttggggtgcaggttcggtctctggcccaggaagatccacgtgccacgagtgcaaccaaaaaacacaaaaaccaaacccctccacttggagcagctggaccctgctc

SEQ ID NO: 73563 - DNA, 110 bp, synthetic construct
  source 1..110: mol_type = other DNA
tcttgaagcttgccctcgggaacacgtatgaaggacttagtacagggccagacatagtataatgactgtgacctattgttattgttatattactaagcattgtacacgga

SEQ ID NO: 73564 - DNA, 110 bp, synthetic construct
  source 1..110: mol_type = other DNA
agtataatgactgtgacctattgttattgttatattactaagcattgtacacggaccattgcttttccttagaaaccttttttctctccctttcccagaggtctgagacg

SEQ ID NO: 73565 - DNA, 110 bp, synthetic construct
  source 1..110: mol_type = other DNA
gccttctgtctcctctgtgcctgtcaccactgggcaaggccccaccacctttccgcccgcgagtactcctcaagcacagctttcttcacaaaagatggagtctttctctg

SEQ ID NO: 73566 - DNA, 110 bp, synthetic construct
  source 1..110: mol_type = other DNA
aggacccaagccaccttgcgggatttagatggtgtagaagcgcttatttcttctgtagagtctgggcttcacctctaccgcgccctgtacccttcctggggtcttttttg

SEQ ID NO: 73567 - DNA, 110 bp, synthetic construct
  source 1..110: mol_type = other DNA
agggagagctagctagcaggaaagcaaatggccgctcctacggaaggatttttggcacagaaaggaaggcgcagcagaaactttcaatgcacaaactctcccggaacaaa

SEQ ID NO: 73568 - DNA, 110 bp, synthetic construct
  source 1..110: mol_type = other DNA
cacagaaaggaaggcgcagcagaaactttcaatgcacaaactctcccggaacaaagatattcaagaagcggggcgtagtgagctctcttcgcctcgggtacttacaatcc

SEQ ID NO: 73569 - DNA, 110 bp, synthetic construct
  source 1..110: mol_type = other DNA
ggtttttgacatgtgtggcagctttgctcctaatgaggttctcggactcaccatgcgccctggctggactccttgtcgctgacttcaagtcagtctgtctcacttctcaa

SEQ ID NO: 73570 - DNA, 110 bp, synthetic construct
  source 1..110: mol_type = other DNA
gcatggtaagctgcacctggtaagatgcgaaaaaaaaaaaaattggaagtgagtaggggcagaagatgtggtagaacaagttgggaaaagctttcctatatggcacgtcc

SEQ ID NO: 73571 - DNA, 110 bp, synthetic construct
  source 1..110: mol_type = other DNA
gttattttatgacatgaaagttacataaactcaaacttcaaaagttctactggcagatggccacgctcatttttgtttgtctatggctgcttctgagctacaagagcagc

SEQ ID NO: 73572 - DNA, 110 bp, synthetic construct
  source 1..110: mol_type = other DNA
gatggccacgctcatttttgtttgtctatggctgcttctgagctacaagagcagcgttaagtagttgaaacagaagctgcacagccggtgaagggtaaaacagttactac

SEQ ID NO: 73573 - DNA, 110 bp, synthetic construct
  source 1..110: mol_type = other DNA
cgggtcagacactgggacccggtctctcatgcccacgaagaccctcaaggacacagccttgccccgtccgtcatgacggtcatgtgtaatgatgctgagcctcaagatag

SEQ ID NO: 73574 - DNA, 110 bp, synthetic construct
  source 1..110: mol_type = other DNA
gccttgccccgtccgtcatgacggtcatgtgtaatgatgctgagcctcaagataggtggttgagtgaaaaagcgaggtggccgggaccggcgcatgcacacggacgtcgg

SEQ ID NO: 73575 - DNA, 110 bp, synthetic construct
  source 1..110: mol_type = other DNA
ttataaatatgttagattaaactcttagaggtgcattttaacaatctgtgtgtgccccaccctggatgcacgtgagctgcctactagtggaagaggtcagactcggaaga

SEQ ID NO: 73576 - DNA, 110 bp, synthetic construct
  source 1..110: mol_type = other DNA
cccaccctggatgcacgtgagctgcctactagtggaagaggtcagactcggaagacgccgcactaaagaacttgatgttctggggagaaaattctgtgatgcttcgtcac

SEQ ID NO: 73577 - DNA, 110 bp, synthetic construct
  source 1..110: mol_type = other DNA
tggttgccttgcgagaggcgcaaataaataatgttcagttaagggcgttggcaaaggcggaatttgaaaaaatggtacctgcaatggtataaaaatgagcagggacttgg

SEQ ID NO: 73578 - DNA, 110 bp, synthetic construct
  source 1..110: mol_type = other DNA
ggcggaatttgaaaaaatggtacctgcaatggtataaaaatgagcagggacttgggaactggaacaagctgggttcgcatcccagccccacccctcaccaccctggtgac

SEQ ID NO: 73579 - DNA, 110 bp, synthetic construct
  source 1..110: mol_type = other DNA
agaagtagaaactaaggcttgggaagccacctccttcatggcacagttgggtaattccagtcgatgccccatacttggcaggtaagtgtcaccactcacaccaagttaac

SEQ ID NO: 73580 - DNA, 110 bp, synthetic construct
  source 1..110: mol_type = other DNA
tccagtcgatgccccatacttggcaggtaagtgtcaccactcacaccaagttaacacagaagaaatcagctttgctcacctgggcgagagagaaaaaggagaaagataat

SEQ ID NO: 73581 - DNA, 110 bp, synthetic construct
  source 1..110: mol_type = other DNA
ttctcaagggaagtcagaactctggatttttttcccttaatgtgaagtttctttatttttaaatatggcagctaattaaaaaatgtaaaatctaagcccctggttggcca

SEQ ID NO: 73582 - DNA, 110 bp, synthetic construct
  source 1..110: mol_type = other DNA
gttctaagtactttgaagacagagagtgggctgcaggtctggtgtgtcctcaaacattgtttttcataccggagctgaattaaattggattaacgacatcatgataaaaa

SEQ ID NO: 73583 - DNA, 110 bp, synthetic construct
  source 1..110: mol_type = other DNA
gttcccagagcctggagcgaaccctcacctttgcctgtgcacatgcttcagacgggttctcccgagtcagggccttgagatagtaggagctttgggatctcagaaccgag

SEQ ID NO: 73584 - DNA, 110 bp, synthetic construct
  source 1..110: mol_type = other DNA
gttctcccgagtcagggccttgagatagtaggagctttgggatctcagaaccgaggtgcctatagctactctggattcttaggcactagataaggagcctgattaaagtg

SEQ ID NO: 73585 - DNA, 110 bp, synthetic construct
  source 1..110: mol_type = other DNA
gtcaaatgagtcaccccagagggtgtcaagctgaggatattgccacacactgtacttgaactctcagccacatcccagcatgctgcccggccttcagccttatcttccta

SEQ ID NO: 73586 - DNA, 110 bp, synthetic construct
  source 1..110: mol_type = other DNA
ttgaactctcagccacatcccagcatgctgcccggccttcagccttatcttcctaaacctttatttcttccctgtccagtgaatatcaaagggactgatggggctgcgtg

SEQ ID NO: 73587 - DNA, 110 bp, synthetic construct
  source 1..110: mol_type = other DNA
caagaaccaaggactgcatcttgaatattcttaaagcccttcttggcattgtatgaaggagctgcttagttagcgtgtaagtgttgttctgtacttttaatcctaaatta

SEQ ID NO: 73588 - DNA, 110 bp, synthetic construct
  source 1..110: mol_type = other DNA
caattcttctctaattatatttaaaaagacttcccttgtgtttaaaaatttagcaaatagtagtgtaattagctatgattagtcacacaacccaggtcctttggtctccc

SEQ ID NO: 73589 - DNA, 110 bp, synthetic construct
  source 1..110: mol_type = other DNA
aatagtagtgtaattagctatgattagtcacacaacccaggtcctttggtctcccctacacaaggctacagatagggttatatacataaaacctatgatacttttcagac

SEQ ID NO: 73590 - DNA, 110 bp, synthetic construct
  source 1..110: mol_type = other DNA
cctaaaccccaacccctgcctgcagccaatgactgactagtgtcgaatataagcatccagcctccatgcttcccatgcctcatatcagttcaagctgtggtcttattcac

SEQ ID NO: 73591 - DNA, 110 bp, synthetic construct
  source 1..110: mol_type = other DNA
tccagcctccatgcttcccatgcctcatatcagttcaagctgtggtcttattcacacaccaggattcttccaagattccttgcttttcttactgcctaaataaatcactt

SEQ ID NO: 73592 - DNA, 110 bp, synthetic construct; identical to SEQ ID NO: 73590
  source 1..110: mol_type = other DNA

SEQ ID NO: 73593 - DNA, 110 bp, synthetic construct; identical to SEQ ID NO: 73591
  source 1..110: mol_type = other DNA

SEQ ID NO: 73594 - DNA, 110 bp, synthetic construct
  source 1..110: mol_type = other DNA
tttgttggtctttattaatcattaaaggtggaattgtgaagaatttacttttccgtggggtagttgagcagctactgaatggtagtgtacccagtgctgtacagagacgg

SEQ ID NO: 73595 - DNA, 110 bp, synthetic construct
  source 1..110: mol_type = other DNA
ttccatccttcttccctttagtacttttccttgatacctcccttagcttcccctagtcacttgaaaaatacaaaacagatcatgccaaagcaaaaattgcacccaactta

SEQ ID NO: 73596 - DNA, 110 bp, synthetic construct
  source 1..110: mol_type = other DNA
tcagagattaatatacctaaaagggaggcaaaaacacttgctgggaaaactggacagctacatgtaaagcaataatattagaatatttcctcacatgatatgcaaaataa

SEQ ID NO: 73597 - DNA, 110 bp, synthetic construct
  source 1..110: mol_type = other DNA
cctaaaagggaggcaaaaacacttgctgggaaaactggacagctacatgtaaagcaataatattagaatatttcctcacatgatatgcaaaataaaataaaatttgtatt

SEQ ID NO: 73598 - DNA, 110 bp, synthetic construct
  source 1..110: mol_type = other DNA
taagagtgcaatagacacggtgtcagagttattgggagctaactgggggcccattgtggactcagggaaatgccttactgtttgtccaggcatcaggacatcatcccatc

SEQ ID NO: 73599 - DNA, 110 bp, synthetic construct
  source 1..110: mol_type = other DNA
cacacatcgtgattggctcaggataacccaatcagatcccttgagattgggacgcttcaatctggaattaaagagctgcataacaagtggagagcttgtttggggttata

SEQ ID NO: 73600 - DNA, 110 bp, synthetic construct
  source 1..110: mol_type = other DNA
gatacctaataggactctttgcttcagtcaaaacagaagctaattattccccagtcttcagctttcttcacagtaaataccatcaccactcacacactttctcgggagaa

SEQ ID NO: 73601 - DNA, 110 bp, synthetic construct
  source 1..110: mol_type = other DNA
ggttttcaagaggaacgttcagctctcaagctccaagaggctaggcatgaccacgtgcaaaaagccaagaacaaattcaccaggagcaaggaaatctggaattcccggga

SEQ ID NO: 73602 - DNA, 110 bp, synthetic construct
  source 1..110: mol_type = other DNA
ctgggtcagtggcataaaagatgacacgtatgtttgtccttgtgcaaaagctgacgtgtgcctgtgcgtgtgagtgcagatgtgcgtacagaagggggaatatgtttaag

SEQ ID NO: 73603 - DNA, 110 bp, synthetic construct
  source 1..110: mol_type = other DNA
aaggcaagataggagataaagtcggcattttccccatcctgttcgtagaggtacgtgagcaccaggcccacgtctgactcgcgctgcctcagagttagacatgtgctgca

SEQ ID NO: 73604 - DNA, 110 bp, synthetic construct
  source 1..110: mol_type = other DNA
tgagcaccaggcccacgtctgactcgcgctgcctcagagttagacatgtgctgcagggatgcctgagaacagttcctgttggatatgaagcttgttttagaataaactaa

SEQ ID NO: 73605 - DNA, 110 bp, synthetic construct
  source 1..110: mol_type = other DNA
gtcccgggtagacatcctaaccagggcatgtgtggggcgagtgaagggctgtggcagcagaggagagggcagtccttagcttggcctcacgttccctggaagacgggtat

SEQ ID NO: 73606 - DNA, 110 bp, synthetic construct
  source 1..110: mol_type = other DNA
agcagaggagagggcagtccttagcttggcctcacgttccctggaagacgggtatttgaatatttgggtgttagtctttctgtgaccgaggtgggaaaagttcagaaacc

SEQ ID NO: 73607 - DNA, 110 bp, synthetic construct; identical to SEQ ID NO: 73605
  source 1..110: mol_type = other DNA

SEQ ID NO: 73608 - DNA, 110 bp, synthetic construct; identical to SEQ ID NO: 73606
  source 1..110: mol_type = other DNA

SEQ ID NO: 73609 - DNA, 110 bp, synthetic construct
  source 1..110: mol_type = other DNA
ctggatgattaggcctcctgtgtgtctgtcatctctggtgtcctttgtatttatctccagtgcctcggtaactaagggcatgctagttccttgaactagtttctaatctg

SEQ ID NO: 73610 - DNA, 110 bp, synthetic construct
  source 1..110: mol_type = other DNA
taacatgaacattgtgcgggttcctgcagtacttgggtttcctgtatatttaaggtagcttaatttttaggacaattaagtattgtatgataagagaagttttgtatttt

SEQ ID NO: 73611 - DNA, 110 bp, synthetic construct
  source 1..110: mol_type = other DNA
ccccagggcaggacacgtcgtcactggagcagcatgctctagagtgtactgtgtgagctgctgaaaacagctccagcccctattttttctggtaaataaacccatatttc

SEQ ID NO: 73612 - DNA, 110 bp, synthetic construct
  source 1..110: mol_type = other DNA
tagaaaaaaaattaatagtatggttttgaagctggaacgaaccctgaaagacacaattgttgttgataaaagaaagaaatagaaaggcctcactggagttcccattgtgg

SEQ ID NO: 73613 - DNA, 110 bp, synthetic construct
  source 1..110: mol_type = other DNA
catcacgtcagaaccaaagcttgtccccaggagaagggtgtgcatgtgctgtcctccgcggtcacacacaaactcatggccatgtggaaggggcatgaagccagaggagg

SEQ ID NO: 73614 - DNA, 110 bp, synthetic construct
  source 1..110: mol_type = other DNA
ccgcggtcacacacaaactcatggccatgtggaaggggcatgaagccagaggaggagactgacaaatcatgttgttcctacgccctttggttcttttcagttccacccta

SEQ ID NO: 73615 - DNA, 110 bp, synthetic construct
  source 1..110: mol_type = other DNA
gtggagcttacagaaccccagtggaggtgcaggaatgagctcacacacatgggtatccactgtactaagaattccctactccccctttttgggctgtgtccacggtatgc

SEQ ID NO: 73616 - DNA, 110 bp, synthetic construct
  source 1..110: mol_type = other DNA
tggattcccacagaggactgctatgcaccacttaaaaagcagaaatctgagctggagagattaatgtgcctaatggcagaattgtaatcatcaggtgaagtttaagaaag

SEQ ID NO: 73617 - DNA, 110 bp, synthetic construct
  source 1..110: mol_type = other DNA
tacaagccagccctttgacgtcagtgcatggaattcaccagctaagggtatacgtcaggaatgtacttgggacctatttttggtcaatgaaatcaatgggtaattttgga

SEQ ID NO: 73618 - DNA, 110 bp, synthetic construct
  source 1..110: mol_type = other DNA
gaaccactgcttcctcttcattttgtctcaagtgctgtctccacaattgggagaatcctttaatttagggacgcagaatctcaaaatagagagcaggtaggttctttcat

SEQ ID NO: 73619 - DNA, 110 bp, synthetic construct
  source 1..110: mol_type = other DNA
tcctttaatttagggacgcagaatctcaaaatagagagcaggtaggttctttcatgcaggaaaaagagagagctgatccttcatattgtttgtggaacagaggagcagtt

SEQ ID NO: 73620 - DNA, 110 bp, synthetic construct
  source 1..110: mol_type = other DNA
cagtattttttgtaagcattttgcatatgttaacgcattacttcgttagcctcattttgtaagttgataaagctgaggcccagagagcggaagccgcttctctggtggag

SEQ ID NO: 73621 - DNA, 110 bp, synthetic construct
  source 1..110: mol_type = other DNA
cgttacagagcctttcagaacgtgaggcgagctaccgttaggaaaggcctacaagagaagcttgctttctctacttcttgtccaggactatttcaaggactttctccact

SEQ ID NO: 73622 - DNA, 110 bp, synthetic construct
  source 1..110: mol_type = other DNA
agaagcttgctttctctacttcttgtccaggactatttcaaggactttctccactcttgggtgcacatgtttgatgtacacttaaaaaaaaaaaaaaaaaaaaaaaaaaa

SEQ ID NO: 73623 - DNA, 110 bp, synthetic construct
  source 1..110: mol_type = other DNA
taaatgaggtgtgaatactccccagcttcacccactgtactatctcctcacatctgggattctgggggaattccccctttcccaaaaagcatgaatcgtttctttgcact

SEQ ID NO: 73624 - DNA, 110 bp, synthetic construct
  source 1..110: mol_type = other DNA
gggattctgggggaattccccctttcccaaaaagcatgaatcgtttctttgcactgaatcaagtcttgaatattaacacattctgtctgtgcccagtcaggggtctcgac

SEQ ID NO: 73625 - DNA, 110 bp, synthetic construct
  source 1..110: mol_type = other DNA
ggaccagaggaggaccaagtctcagagctgtttctaagcaaagcttactgccatagcccaagcagtaacacggcataccccatccacgaagtatacatacttccattcat

SEQ ID NO: 73626 - DNA, 110 bp, synthetic construct
  source 1..110: mol_type = other DNA
ggagcggcccaaagaaatagcaaaaagacacacacacacaaaaaaaagaagttctgtttggttatattggcttattggttatcatcatctctcatgacacagttttgatt

SEQ ID NO: 73627 - DNA, 110 bp, synthetic construct
  source 1..110: mol_type = other DNA
agacacacacacacaaaaaaaagaagttctgtttggttatattggcttattggttatcatcatctctcatgacacagttttgattccttctttaatggctttattcactg

SEQ ID NO: 73628 - DNA, 110 bp, synthetic construct
  source 1..110: mol_type = other DNA
caaacctcctgcccttccaaagcctgatccaaattccctccagaatctcccttagaatagctcctgataagtgacagcctcttcagtgtgaatctccttgccatgcactt

SEQ ID NO: 73629 - DNA, 110 bp, synthetic construct
  source 1..110: mol_type = other DNA
tcatcatcattcatcatttattgcctcgctgggatatgcttcacccacagggattgcaaactgctgtggtttcaggggcctagcagatgagtaggtcgtggagttggctg

SEQ ID NO: 73630 - DNA, 110 bp, synthetic construct
  source 1..110: mol_type = other DNA
ttgcggggacgcggcagaagggacagcagttcagttagaggccctcacaggccccttggacgtgtcgtaggttcattcctcaagtgcatacggagtggctcccccaggca

SEQ ID NO: 73631 - DNA, 110 bp, synthetic construct
  source 1..110: mol_type = other DNA
ttggacgtgtcgtaggttcattcctcaagtgcatacggagtggctcccccaggcagggctgggctctggtgctcggcgcccacctgcggcctgtcctcataacacggacg

SEQ ID NO: 73632 - DNA, 110 bp, synthetic construct
  source 1..110: mol_type = other DNA
tgttgttaatgcctggggtgctgctaggatcctctgtcacctgcgtgaccacctgccagtgttcacgtccctctgttcacacagcatagaggggttctctttccagctgg

SEQ ID NO: 73633 - DNA, 110 bp, synthetic construct
  source 1..110: mol_type = other DNA
ccagtgttcacgtccctctgttcacacagcatagaggggttctctttccagctggttagtgactgttgtgcagctctgcagctgggccacagggagggagtgggtggtgg

SEQ ID NO: 73634 - DNA, 110 bp, synthetic construct
  source 1..110: mol_type = other DNA
agttgttgcaccccccagaaaagtgcgatttccatcggtttctctttaagttctggttagggaagagacacgcttgcttagagcgcatgggggctgccctgagatgaggg

SEQ ID NO: 73635 - DNA, 110 bp, synthetic construct
  source 1..110: mol_type = other DNA
gagcattagggctccagccgtccccacggtcaaaaatcgcgtcagaaacttagcgtctgccctcctcgtccgaggttcctccgcacctgcaggttcagcagctgctggcc

SEQ ID NO: 73636 - DNA, 110 bp, synthetic construct
  source 1..110: mol_type = other DNA
aaaagaaatattaacaggcttaactatctctgatgaggtaaacccgccaaacccgggattctctacataactaacccttccgggctgcatccgcgtctcagaaacccctt

SEQ ID NO: 73637 - DNA, 110 bp, synthetic construct
  source 1..110: mol_type = other DNA
tgaaatgtcttggtcaaccgtaaggtgccctttctgagcctttttccacctgtctgagcttcatttagatcatttataaaatagactaactaaattgaaaaacttaataa

SEQ ID NO: 73638 - DNA, 110 bp, synthetic construct
  source 1..110: mol_type = other DNA
agtttgtagaaagcagaaggaatgcaaatacaactcttctcctactgttattatctttctttttatagagtaatctatctttgtgctgtaaaaaattgaggaaatatagg

SEQ ID NO: 73639 - DNA, 110 bp, synthetic construct
  source 1..110: mol_type = other DNA
gccaccaacccgactcccttcacagttcctctcatctgaaaaggggtttcgtcctgaggtttagtggaggcggggtctgtaaagtgccacactctcaatgtacctattct

SEQ ID NO: 73640 - DNA, 110 bp, synthetic construct
  source 1..110: mol_type = other DNA
gaggtttagtggaggcggggtctgtaaagtgccacactctcaatgtacctattctactgctgtccccgggctgaacaacccctctggaaacgccagcgcccgggccagct

SEQ ID NO: 73641 - DNA, 110 bp, synthetic construct
  source 1..110: mol_type = other DNA
cgggaaacaagtctttgcaagtgaagcaattgacaagagattaatctctaaaacgtacaaacatctcacaaagctttatgtcgaaaaacatccaatcaaaatatgggcag

SEQ ID NO: 73642 - DNA, 110 bp, synthetic construct
  source 1..110: mol_type = other DNA
tacaaacatctcacaaagctttatgtcgaaaaacatccaatcaaaatatgggcagatctaaactgacctttctccaaagaaggcaggtggccaaaaagtacatgaaaaga

SEQ ID NO: 73643 - DNA, 110 bp, synthetic construct
  source 1..110: mol_type = other DNA
cataaatggtgctgtcagtgtgagagggagggaggagctacgtctccagggggtgaaactgaccccaaatgctccatctccaggcaaagccaccttcaccctctggtccc

SEQ ID NO: 73644 - DNA, 110 bp, synthetic construct
  source 1..110: mol_type = other DNA
agacttaagatcgccttaaaaagcctgggggatgcgctggaatcagcccctgcgctctgcatgtagtttgtttttcctgctggagggaaaacaacctcacagcggcagcc

SEQ ID NO: 73645 - DNA, 110 bp, synthetic construct
  source 1..110: mol_type = other DNA
tgcggatcctgagcccgccacggccaggcctgcacgctggggactggtgtccaccttccagaaggaagcctggggcaggggtatgctgaggggacctgagcatgtcacca

SEQ ID NO: 73646 - DNA, 110 bp, synthetic construct
  source 1..110: mol_type = other DNA
ttccagaaggaagcctggggcaggggtatgctgaggggacctgagcatgtcaccagtcgggtaagaaaagcaagctccagacagagaccccggggcagggggatgagaag

SEQ ID NO: 73647 - DNA, 110 bp, synthetic construct
  source 1..110: mol_type = other DNA
caccccctccaccacctccacaccatcatcaccattggaatacccgtctccgagcccatgtgctttattactgagatgtgggtgactgttcttgtatctgggtccccagg

SEQ ID NO: 73648 - DNA, 110 bp, synthetic construct
  source 1..110: mol_type = other DNA
acgtgacaggacgttcaggccgtgcccagggattacatgacgtcgcaggccttgggagccctccccctctctgctctgccattctcgcttggcctcagtccccagaattg

SEQ ID NO: 73649 - DNA, 110 bp, synthetic construct
  source 1..110: mol_type = other DNA
gagccctccccctctctgctctgccattctcgcttggcctcagtccccagaattggctctcgtggctgcaaaatgattgccacagctctggacatcacatcctgacccac

SEQ ID NO: 73650 - DNA, 110 bp, synthetic construct
  source 1..110: mol_type = other DNA
ctgggggcagcgaggggcccgagagtttcagatccaatggtgaaatcaacatcgaggaagatcaagttgaaatgcgtcacggatcggcgacgaaagtcacggcagcccta

SEQ ID NO: 73651 - DNA, 110 bp, synthetic construct
  source 1..110: mol_type = other DNA
cgctccggcggggaccccacggacgctggctgacttggagagtttacactggggttgtctacattcgagaagttttcctgtcatggtttatttagtctacagaaagagtg

SEQ ID NO: 73652 - DNA, 110 bp, synthetic construct
  source 1..110: mol_type = other DNA
ctcgcaggtgatggataaatcaccgcctgagtccagacagcggagcagcactgggccctggggaaaagcgcccgtgagccgcggagaaccacagaaaagaggtgcacacg

SEQ ID NO: 73653 - DNA, 110 bp, synthetic construct
  source 1..110: mol_type = other DNA
ccctggggaaaagcgcccgtgagccgcggagaaccacagaaaagaggtgcacacgcatcacaaagcgggagacgccagagaggagaggccgcagactctgcgcccccgca

SEQ ID NO: 73654 - DNA, 110 bp, synthetic construct
  source 1..110: mol_type = other DNA
cgccgatcgttcccgcgactcggcccaaaggaggtgaagccctcggcgaccctgctgccccgaggctcacggcctcctcaccgggtgttctgggattttacagagacggg

SEQ ID NO: 73655 - DNA, 110 bp, synthetic construct
  source 1..110: mol_type = other DNA
tgccccgaggctcacggcctcctcaccgggtgttctgggattttacagagacgggaccggcagggaccaaaccctgggaccgggtcccacggcgccgaggaggacccgcc

SEQ ID NO: 73656 - DNA, 110 bp, synthetic construct
  source 1..110: mol_type = other DNA
caccaggccaccatcagccctgagcctgaaggctccccggcctccgtccagcccgtcagccaaatttggggcccaagttggcacagacatccgcctgcccactgccccac

SEQ ID NO: 73657 - DNA, 110 bp, synthetic construct
  source 1..110: mol_type = other DNA
gagcgccttctgtgtaccaggcctcacagagaaactgcagagaaaaagcggtcgttctgtcatgagctcaaacaggacagatggacgggtagaggccgcagctcggcgag

SEQ ID NO: 73658 - DNA, 110 bp, synthetic construct
  source 1..110: mol_type = other DNA
gctttagcctcgtacctcaccttccggaggacgaagcgttaaaagggagattgtgggatggtgcgggtgaactgtttacgtgtacagtggaaataaaatcctgcgattgt

SEQ ID NO: 73659 - DNA, 110 bp, synthetic construct
  source 1..110: mol_type = other DNA
agtttaggtggtgtcacactttccatggtaacactgctgtgtttaaaggtctgtagggagctctcgcagcgcagcgggtaaggatccagcagtgtggccagacctggaaa

SEQ ID NO: 73660 - DNA, 110 bp, synthetic construct
  source 1..110: mol_type = other DNA
acaaaatgtgattttctgggccccatcagaaaggcttcataaggcggtctcatctcggcacagcggaaacaaatacgaccagggtccaggagggtgcgggattgatcccg

SEQ ID NO: 73661 - DNA, 110 bp, synthetic construct
  source 1..110: mol_type = other DNA
ttcataaggcggtctcatctcggcacagcggaaacaaatacgaccagggtccaggagggtgcgggattgatcccgggcctcactcagtgggttagggatcccacgttgct

SEQ ID NO: 73662 - DNA, 110 bp, synthetic construct
  source 1..110: mol_type = other DNA
ctgcgcgcgacccgtccccccggccctgggcggcctcctccagagcccctcgctgtgaagtgtctctcgcggcgagtttgccgctagcctttgtccgacgaagaaaaaac

SEQ ID NO: 73663 - DNA, 110 bp, synthetic construct
  source 1..110: mol_type = other DNA
acgctggccgctgccttgtttgctttcggagcgaagtggttgttttcagtttctctgcgacgtgagacggtgggaaaaccggtggcgccgcgggtttgcttgtctgtctt

SEQ ID NO: 73664 - DNA, 110 bp, synthetic construct
  source 1..110: mol_type = other DNA
tgcgacgtgagacggtgggaaaaccggtggcgccgcgggtttgcttgtctgtcttgtttgcagaaagcctggcgaagctgtttagcttgatggatcccaactccccagag

SEQ ID NO: 73665 - DNA, 110 bp, synthetic construct
  source 1..110: mol_type = other DNA
acacagtagcggcttctggaaggtggggcctgaccggggttcagagcacgtccagatggggacgcccggttacctgggaggctctgagctgacaggaaccaggactcaga

SEQ ID NO: 73666 - DNA, 110 bp, synthetic construct
  source 1..110: mol_type = other DNA
atggggacgcccggttacctgggaggctctgagctgacaggaaccaggactcagagggtcaaccaagcacccaggggacacaggccacccgtgccgacaggtggggctgc

SEQ ID NO: 73667 - DNA, 110 bp, synthetic construct
  source 1..110: mol_type = other DNA
ttgtttcattctatattatgtgaatttcaccgtaagaaaaagatgtatacaccttctggtattttctgttcggttctacctctggcctctttcctccagaactgtcctca

SEQ ID NO: 73668 - DNA, 110 bp, synthetic construct
  source 1..110: mol_type = other DNA
tggaatattgttcgaccttgaagaggaaagaaatggaaaccagaagaaagcagagatggctacgcttcgatcagaaaaaaatagactttaagacaaacactgcattaaaa

SEQ ID NO: 73669 - DNA, 110 bp, synthetic construct
  source 1..110: mol_type = other DNA
atggctacgcttcgatcagaaaaaaatagactttaagacaaacactgcattaaaagaccaaaaaaaagtcattgcacaatgatgaggaggtcaacccaacaagacgatgc

SEQ ID NO: 73670 - DNA, 110 bp, synthetic construct
  source 1..110: mol_type = other DNA
tcgggcctcagaactgctgccctcgtgaaaaacaagcgcacttcaagtcttgtctctcggtgcccagcttttgtcgcagcaccgttttccaaggttacctgggcgagccc

SEQ ID NO: 73671 - DNA, 110 bp, synthetic construct
  source 1..110: mol_type = other DNA
ctcggtgcccagcttttgtcgcagcaccgttttccaaggttacctgggcgagccccatctcgccagcccctccaggtgggcagggcctgcctgggcaacagggctgtcac

SEQ ID NO: 73672 - DNA, 110 bp, synthetic construct
  source 1..110: mol_type = other DNA
tcaggttccatccctggcctggggacttccgcatgccatgagcgtggccaaaaaaaagttgattttttttttcctggtcttttttagggccgcacccgtggcatatggag

SEQ ID NO: 73673 - DNA, 110 bp, synthetic construct; identical to SEQ ID NO: 73672
  source 1..110: mol_type = other DNA

SEQ ID NO: 73674 - DNA, 110 bp, synthetic construct
  source 1..110: mol_type = other DNA
ggagccacagcctccagctgagcctggcccctctcacctctgcaggggaaagatcccgagggcctgtttgccgaggacaacgtggtggcctgcaccctggacatggtcat

SEQ ID NO: 73675 - DNA, 110 bp, synthetic construct
  source 1..110: mol_type = other DNA
tcaggcccgccaggagcagccaggccacgaccggttttacagcgagaacaaacgtctctggggactgtcccttctctgggttcccaggaaggagccagagacccctctgt

SEQ ID NO: 73676 - DNA, 110 bp, synthetic construct; identical to SEQ ID NO: 73675
  source 1..110: mol_type = other DNA

SEQ ID NO: 73677 - DNA, 110 bp, synthetic construct
  source 1..110: mol_type = other DNA
aaagcctcttgcataactgggctgccccaggctgcatctgtccacagggtctcacgggcctagggccccaaaataccacccaggcatcagagcagagtggctccttgcga

SEQ ID NO: 73678 - DNA, 110 bp, synthetic construct
  source 1..110: mol_type = other DNA
ttcggtgtctacgagctgccggcaaacagctcaggcgggtttttactctaagatcctgcactgggtgggcgagccggcgccacgcacctgagcccttggaggggactctg

SEQ ID NO: 73679 - DNA, 110 bp, synthetic construct
  source 1..110: mol_type = other DNA
ctgcactgggtgggcgagccggcgccacgcacctgagcccttggaggggactctggccggattggctccacgtgaccgtctcccaggaatcaggccattctttggctggg

SEQ ID NO: 73680 - DNA, 110 bp, synthetic construct
  source 1..110: mol_type = other DNA
cgcgggcacgggggtttgggctgcagatgctataaaaccaggctgtgaggatcgtggcacagctgcgaacgcactaaaattcacgcagttaaaaacaaaacaaaaaccca

SEQ ID NO: 73681 - DNA, 110 bp, synthetic construct
  source 1..110: mol_type = other DNA
gaacactgcaggcttgtctctgccctgatcctcgtctgcggccctattttccgttccccaaactgtaaaccctcctgatcgctcccgggggtgggggcacagtctttaag

SEQ ID NO: 73682 - DNA, 110 bp, synthetic construct
  source 1..110: mol_type = other DNA
agcgcgtggcctttgtaaagaaactattacggtgacgggggaggatttagctgtaaagtggcttgaagagcggaactggatcagaggcaggcggccgagatttaggagag

SEQ ID NO: 73683 - DNA, 110 bp, synthetic construct
  source 1..110: mol_type = other DNA
aagtggcttgaagagcggaactggatcagaggcaggcggccgagatttaggagaggaaacacggccccaagttgtgctggagattctgaaagatactgtcgttctgagag

SEQ ID NO: 73684 - DNA, 110 bp, synthetic construct
  source 1..110: mol_type = other DNA
tttttattcctagttccctttattcctttattgctcctgggccgagacctcgctcctcctagaaatgcagtaaacatctgttgatttgagttagagttaaggaacatcag

SEQ ID NO: 73685 - DNA, 110 bp, synthetic construct
  source 1..110: mol_type = other DNA
ctcctagaaatgcagtaaacatctgttgatttgagttagagttaaggaacatcaggagcaaacatccagaattccactaaaacgcgtttccctggagaacctcataaaac

SEQ ID NO: 73686 - DNA, 110 bp, synthetic construct
  source 1..110: mol_type = other DNA
ggagggaggggagacaccccgatctcagagtggggacaggcccagtggcgggtggggagtcatcaaaaagctttctcttgccgctttgtattaggcgacatggtggaggg

SEQ ID NO: 73687 - DNA, 110 bp, synthetic construct
  source 1..110: mol_type = other DNA
ggagtcatcaaaaagctttctcttgccgctttgtattaggcgacatggtggaggggttgtgtgtgtgtgtgtgtgtgtgtgtgtgtgcgcgtgtgcctgaaaaaagttat

SEQ ID NO: 73688 - DNA, 110 bp, synthetic construct
  source 1..110: mol_type = other DNA
gcttttaatattcatctcagcactgacaatttttcctgccttgttacgggagccggtgtcggtttttctttgtatctttggacagtcagtttattcggagccacttaaag

SEQ ID NO: 73689 - DNA, 110 bp, synthetic construct
  source 1..110: mol_type = other DNA
agagacggaggaggaagagggggcagcgtatttcagcagcgagtctgacactcactacacgtggcgacgacgtctggggtgtgctgggctaaagaaaacacgttatgaag

SEQ ID NO: 73690 - DNA, 110 bp, synthetic construct
  source 1..110: mol_type = other DNA
tacacgtggcgacgacgtctggggtgtgctgggctaaagaaaacacgttatgaagagtaactccacctgcgtcttttgatttttttccacgatggcttctagaaaattct

SEQ ID NO: 73691 - DNA, 110 bp, synthetic construct
  source 1..110: mol_type = other DNA
tgctgggagccttggatgcagagtgttcatcggctcagagaggccaaggccccacccaagatgcacagcagtaacgagcagagctgaacttgaccctggggcgacagggg

SEQ ID NO: 73692 - DNA, 110 bp, synthetic construct
  source 1..110: mol_type = other DNA
ggcaatctccgttttcccaggcaattcacttccacaggggccggggtcgcacctgctgtgtgggaatcagcgcaccgcgaataatcaaacacgggcaacaacccttagca

SEQ ID NO: 73693 - DNA, 110 bp, synthetic construct
  source 1..110: mol_type = other DNA
acacaccgtctcctctcccggcagctcagccaggttggggggggtcaccccatccctctgcagacggggatcctggggctccaagaggagggctgacccttaggccatcg

SEQ ID NO: 73694 - DNA, 110 bp, synthetic construct
  source 1..110: mol_type = other DNA
ctctgcagacggggatcctggggctccaagaggagggctgacccttaggccatcggaaggcaagtgattcccacccagatccgccttcgggtctgcagcgcctgagctgg

SEQ ID NO: 73695 - DNA, 110 bp, synthetic construct
  source 1..110: mol_type = other DNA
cgcttttcaacctactgactcctttcaaacatatctacttccacccttgctccaagctggaaggaaggtgatgccaccccgtttacccaccagccacgagctgtgcccct

SEQ ID NO: 73696 - DNA, 110 bp, synthetic construct
  source 1..110: mol_type = other DNA
ttctaccgctgtcgtggcaaatgtctgcaaactggatggctcagactaagggatattatttcctctccatccatccgggaccagaagtcacacatcaagggccaagcagg

SEQ ID NO: 73697 - DNA, 110 bp, synthetic construct
  source 1..110: mol_type = other DNA
gacggcagagctcctggccaggctgggtttctatttttataacttgaaaacatccaggcatggctcacgtacagtagatgcacttggtgtgcagttgtgagttctgacaa

SEQ ID NO: 73698 - DNA, 110 bp, synthetic construct
  source 1..110: mol_type = other DNA
aggcatggctcacgtacagtagatgcacttggtgtgcagttgtgagttctgacaaacgcgtgtgagaggtggcggtgagcgcagtgccctggccgccgttccctcctgac

SEQ ID NO: 73699 - DNA, 110 bp, synthetic construct
  source 1..110: mol_type = other DNA
gggttcagaaacacctcccggacctaagttacacctcatccatgtcagagaggtggtctcatgcccagggactctgggacagacacaggtggccacttgcccctacttga

SEQ ID NO: 73700 - DNA, 110 bp, synthetic construct
  source 1..110: mol_type = other DNA
cctttctcttcatagccgttgctttcgtcccccctcttgggtattttaagaattgatttgtaagagctctttacatgtgagggtagaggctcttggctgggatagaagtt

SEQ ID NO: 73701 - DNA, 110 bp, synthetic construct
  source 1..110: mol_type = other DNA
atttgtaagagctctttacatgtgagggtagaggctcttggctgggatagaagttggacatgttgtttcttcttggtgtgtttgcttgtatgcacctgcagcctatggaa

SEQ ID NO: 73702 - DNA, 110 bp, synthetic construct
  source 1..110: mol_type = other DNA
agttcaaggagaaaactcccgtgtcttggggacagagatgggagatgtgttaccgggtgggaagatggtacaggcagagctccacaatcagagctgcagggctgttgcag

SEQ ID NO: 73703 - DNA, 110 bp, synthetic construct
  source 1..110: mol_type = other DNA
tgaaatgcaaatgtcaagtttgggtcttgtctttgtcccacccggaccggaccggagtggaccagacaggcctcgcctcgtccaggaaggaggggtgccctccctcccag

SEQ ID NO: 73704 - DNA, 110 bp, synthetic construct
  source 1..110: mol_type = other DNA
gcagcctttgccgccgacgtgccggagcagatcaacagccctcgttagaaaaacggaacttgacctgaacctcacactccgtgtaacatttaacttacactgcatcgtgg

SEQ ID NO: 73705 - DNA, 110 bp, synthetic construct
  source 1..110: mol_type = other DNA
aatcctctctcgataaagctgctttgtagaacgagaaatgaaagagacaacagtgaaaacaaacagaaggacgcgtgtggacgctgcatctgctgccgagagcctggcgc

SEQ ID NO: 73706 - DNA, 110 bp, synthetic construct
  source 1..110: mol_type = other DNA
tccggctggaaagcactggtcatcgggctgcatggagccatgaccacactgcctgcccggagctggagcagaggagagtggcgggaggcggtcggctgggctggggcctg

SEQ ID NO: 73707 - DNA, 110 bp, synthetic construct
  source 1..110: mol_type = other DNA
ctgccgtgggctgttgcagctgaaccgtgcccgttgtccctccccaggtgccgttgacaccatcttctccctgcagggagattccagcctgtttgtggcctcggcagccg

SEQ ID NO: 73708 - DNA, 110 bp, synthetic construct
  source 1..110: mol_type = other DNA
gtctgcggaggcagccctggggctcctggccctccctctcgctcgcctcacagcactggctaagggccctgacgctgtgctggtggcagcgtgcagcttgcctgcttcca

SEQ ID NO: 73709 - DNA, 110 bp, synthetic construct
  source 1..110: mol_type = other DNA
ctggctaagggccctgacgctgtgctggtggcagcgtgcagcttgcctgcttccatctcagggaaaacgttcaacgtttaattactaaaaacaacccttgtggctccact

SEQ ID NO: 73710 - DNA, 110 bp, synthetic construct
  source 1..110: mol_type = other DNA
cggcctgcggaaaagactgccgtggccatgactgtctccgggcaggaagtaggcctggcccatcgtcctccgcctggtgcttcgaaatcagcaacacggcacccgaggaa

SEQ ID NO: 73711 - DNA, 110 bp, synthetic construct
  source 1..110: mol_type = other DNA
gagacgggcgagggcagctattcagctgaggaaagttcttagaccacaacagactgaggcataaggtaaaggtacccacaaatgatcaatatttgggctcttcccttgat

SEQ ID NO: 73712 - DNA, 110 bp, synthetic construct
  source 1..110: mol_type = other DNA
gaggcataaggtaaaggtacccacaaatgatcaatatttgggctcttcccttgatcctgcccttccagcatctcttcatggaccagtaatagttcagggtcaagaatgaa

SEQ ID NO: 73713 - DNA, 110 bp, synthetic construct
  source 1..110: mol_type = other DNA
agatacacagttcatccaactgtaaaataagcgcctgtgtagtcaagaatttgaactgccagcttgtagaagcagttgtgtttgttacctctttagtttttatttattta

SEQ ID NO: 73714 - DNA, 110 bp, synthetic construct
  source 1..110: mol_type = other DNA
tttgatttgtgcgaactgagcaagaagaaagattttatacaaatcaggagtgacttttttcatattgaggaggtaatggtttataaaaagattctccctagagttctttt

SEQ ID NO: 73715 - DNA, 110 bp, synthetic construct
  source 1..110: mol_type = other DNA
tttttcatattgaggaggtaatggtttataaaaagattctccctagagttcttttaagatccagcctctgctcagtcttacacattgtgattaattgacacaagctaact

SEQ ID NO: 73716 - DNA, 110 bp, synthetic construct
  source 1..110: mol_type = other DNA
gacaggaagcttaggggtgcttagaagggcatgcttgtagagatgggtcctgggctttaaaggcctccagaaacgatgacagagaaggactagagatccgcacgaaagtt

SEQ ID NO: 73717 - DNA, 110 bp, synthetic construct
  source 1..110: mol_type = other DNA
tttaaaggcctccagaaacgatgacagagaaggactagagatccgcacgaaagttggctcctcttgtgggcacgctgaacgatgacaggaagcgtgctggtgtctcagtg

SEQ ID NO: 73718 - DNA, 110 bp, synthetic construct
  source 1..110: mol_type = other DNA
cagcttccctccccttcagcctgctccctgacgctgccgacacccagacagaagctggctcttctctagaggacataaggcgacatggcggagagcacagacttgcacga

SEQ ID NO: 73719 - DNA, 110 bp, synthetic construct
  source 1..110: mol_type = other DNA
tggctcttctctagaggacataaggcgacatggcggagagcacagacttgcacgaggttccctgggtccacgttcctggctgtgccgctttccagctctgtaccttgggt

SEQ ID NO: 73720 - DNA, 110 bp, synthetic construct
  source 1..110: mol_type = other DNA
gttcgcacggctagtttcctacatgcctgctctccaaaggccagtagaaaatacagctaatccatgaatttgctcgttgccatactaatgcaataccatgcgttagataa

SEQ ID NO: 73721 - DNA, 110 bp, synthetic construct
  source 1..110: mol_type = other DNA
cgatcagcacgtcaccggttggcatggggacatgtccttctcatgtgtgtgccgtcttcttccgagctgccggccgtgacaagaagccagttaggagagatgcaccttct

SEQ ID NO: 73722 - DNA, 110 bp, synthetic construct
  source 1..110: mol_type = other DNA
gcaactcctgcgcctcagggccgctgttgcatgtgtccccgagaaccactgggcgtcacgcggaataaaactcttgctctcccagagcagggtctggccacgggttggct

SEQ ID NO: 73723 - DNA, 110 bp, synthetic construct
  source 1..110: mol_type = other DNA
gcggcctgggcgccgtgtggctggcgttggagcccgaggccctggcagttctcggggtgcccacggccgtggtcatcctccatgtctttgctctccaggggtgcttctga

SEQ ID NO: 73724 - DNA, 110 bp, synthetic construct
  source 1..110: mol_type = other DNA
ggtgcccacggccgtggtcatcctccatgtctttgctctccaggggtgcttctgacttaaccacaatcccctctgcatcctcagtgtcagctttgcttcctccctacgga

SEQ ID NO: 73725 - DNA, 110 bp, synthetic construct
  source 1..110: mol_type = other DNA
gctttaaacagtgacttgaggggacggttgtttggggagtgagtcaaaacaaggaagaaacgcattagctctaccttcgttttgactctgccccgaatccagcgcttctt

SEQ ID NO: 73726 - DNA, 110 bp, synthetic construct
  source 1..110: mol_type = other DNA
cacgggccagtctcagtgtgtgcctgttgcgtgtaattgctttgcctggatgacttcactggatactcaggagagcctgtggcgtacacaccataaatacccccgttttc

SEQ ID NO: 73727 - DNA, 110 bp, synthetic construct
  source 1..110: mol_type = other DNA
gccatcacttcggcaaacagttcagcactttcctaaaaagctcaacagacaccgacgcagacacttcgccctgggtttttacctgagagcaaggaaagcgaacgtccgtc

SEQ ID NO: 73728 - DNA, 110 bp, synthetic construct
  source 1..110: mol_type = other DNA
tgaaatgaagtttctctgcagccgcctcatccagaactaggctggtgactggctgcaggacagggcagctcctgcatcctctcccctgaccagggctaatcgcatcactg

SEQ ID NO: 73729 - DNA, 110 bp, synthetic construct
  source 1..110: mol_type = other DNA
ttcttccttcttttactgtgaaatgcctcaaaaacatatcttctgtcttttagatgactttaaattcctcttctttcaaaaccatgtaataggtccccattttgtcttac

SEQ ID NO: 73730 - DNA, 110 bp, synthetic construct
  source 1..110: mol_type = other DNA
ctgctgcccccaggttgtgtccagtaggccttgaggagtcacagatagttctggaatgtgagcttcccatccatggaggagacttcagaattaggggcggtcggcctggg

SEQ ID NO: 73731 - DNA, 110 bp, synthetic construct
  source 1..110: mol_type = other DNA
atgtgagcttcccatccatggaggagacttcagaattaggggcggtcggcctgggggccagtgcctggtgtcctggggctggccacccgctgcagcgcgccctgcatgtc

SEQ ID NO: 73732 - DNA, 110 bp, synthetic construct
  source 1..110: mol_type = other DNA
atatggcattcagaatgctgctgagttacactgatcttcctttttttatgatggggttacattctgataaacccaccctaaattggaaatattttaagtcaaaaaatgta

SEQ ID NO: 73733 - DNA, 110 bp, synthetic construct
  source 1..110: mol_type = other DNA
gttacattctgataaacccaccctaaattggaaatattttaagtcaaaaaatgtatttaatacacctaacttaccatcccagcttagaccaacctaccttaaacatgctc

SEQ ID NO: 73734 - DNA, 110 bp, synthetic construct
  source 1..110: mol_type = other DNA
acagtctgcttgcttctgcacctggacccttcactcggcactttctgtgaaccggagctgctattgcctgtgctcactgcccgttcattctccttactctatggtattct

SEQ ID NO: 73735 - DNA, 110 bp, synthetic construct
  source 1..110: mol_type = other DNA
gcaatgccatactgcttatgactcaccagtgacaaaatcttaaccccaaatcatgcagaaaactttcccaagacatgctatggactatcacccaaaacaatccctgaggg

SEQ ID NO: 73736 - DNA, 110 bp, synthetic construct
  source 1..110: mol_type = other DNA
aactgttctagtttactttgctgggctttcttaattacaactggctggcttctgatgatggtgaacattttgtgtgtcaattgcccaatcatctttccccttttgtgcat

SEQ ID NO: 73737 - DNA, 110 bp, synthetic construct
  source 1..110: mol_type = other DNA
tgatggtgaacattttgtgtgtcaattgcccaatcatctttccccttttgtgcattgcttacagttatcctttgccatttgtatttggtttgtttaccatcttcctattg

SEQ ID NO: 73738 - DNA, 110 bp, synthetic construct
  source 1..110: mol_type = other DNA
cacacacgggcaaccatcttcaagatcgctgctaccctgggaaggggtagttaaatgggggtaagactaagttaaaaagccagaaccttggggagttcccatcctggtgc

SEQ ID NO: 73739 - DNA, 110 bp, synthetic construct
  source 1..110: mol_type = other DNA
aactaatggaccaaagtaataatcctctcttctcactaagtgtccctaaaatacaaataaggcagatgttccatttttagtacgtacatactgtaaacatttttattgta

SEQ ID NO: 73740 - DNA, 110 bp, synthetic construct
  source 1..110: mol_type = other DNA
acaaatgaataatttggtccttgggtttagaccacagatgagcacaagcacactgtacagaaaagctgcccctgacgtggggttggaaagagatgacggatgcaacgtga

SEQ ID NO: 73741 - DNA, 110 bp, synthetic construct
  source 1..110: mol_type = other DNA
aaaatctgtttccatctagtggaaaaagcaatcccatgtcagggagctcagccatttgcacatccggatccttttaccacaaagggcttacgcgcctggcccgccgctgt

SEQ ID NO: 73742 - DNA, 110 bp, synthetic construct
  source 1..110: mol_type = other DNA
ttgcacatccggatccttttaccacaaagggcttacgcgcctggcccgccgctgttccccttcgagatgatctgggtgctggagccaaatgaaattccaggagggcgaca

SEQ ID NO: 73743 - DNA, 110 bp, synthetic construct
  source 1..110: mol_type = other DNA
aaaatgggtgtaataagaagacctacctatattagtctcctggggctgccataaccaattaccacaaacttaatttaatcctaggatggcttaacacaacagaagtttat

SEQ ID NO: 73744 - DNA, 110 bp, synthetic construct
  source 1..110: mol_type = other DNA
caattaccacaaacttaatttaatcctaggatggcttaacacaacagaagtttattcttctgtgggtctggaggccagaagttcaattttagtttcgctggcctaaatca

SEQ ID NO: 73745 - DNA, 110 bp, synthetic construct
  source 1..110: mol_type = other DNA
attattactaccatcttctagatgaggaaacagactgggaggagttaaacaacccacctaaggtcaaggtcaaagctgcaattcatactcagtcctgcccaattcctagc

SEQ ID NO: 73746 - DNA, 110 bp, synthetic construct
  source 1..110: mol_type = other DNA
tgccggggactcttggggcctctctggcaacagagaggtgctgcctggcacgaacatctccttgggactcattaactgggtgcagtgggggtgatgagggtgggggtggt

SEQ ID NO: 73747 - DNA, 110 bp, synthetic construct
  source 1..110: mol_type = other DNA
tttagtcactttggagtggggaagcatcactccagctttcgtgtacccggaaccctgactctctggcctcagtttcctgggccgtagattgggttgataaaagtactagg

SEQ ID NO: 73748 - DNA, 110 bp, synthetic construct
  source 1..110: mol_type = other DNA
tgactctctggcctcagtttcctgggccgtagattgggttgataaaagtactaggactggctgcagtcactatcggctgggtcccaactacggggcgtgtggcacagagt

SEQ ID NO: 73749 - DNA, 110 bp, synthetic construct
  source 1..110: mol_type = other DNA
catgcacagaaaagagactctggcacccccgcctccccggcacatcctgggctatagtcagagcacacaagctttattcagcaataatggcaggatttcatgagaatgag

SEQ ID NO: 73750 - DNA, 110 bp, synthetic construct
  source 1..110: mol_type = other DNA
tgatgtgttgacacagttccaacgtgaacagatcatccaacaccagactgaggtggagaagctggacccgggactgtgtgttgtgtgattgcttgtatatggaataactg

SEQ ID NO: 73751 - DNA, 110 bp, synthetic construct
  source 1..110: mol_type = other DNA
tggaaccgaacccgattcccctggagctgcaggagtgactcaagtgacagcaatcccttcaggtaaaggccaagcccacttgacgtattttgcaaacgcagaaggtcccg

SEQ ID NO: 73752 - DNA, 110 bp, synthetic construct
  source 1..110: mol_type = other DNA
gctgactctctgccttgtgagatcatttaaaaagttggaatctcatttccacaccaaatgacagatgccaaaaatgtaaagttgtgagtttattgcatatgtaacaaaat

SEQ ID NO: 73753 - DNA, 110 bp, synthetic construct
  source 1..110: mol_type = other DNA
aaatgacagatgccaaaaatgtaaagttgtgagtttattgcatatgtaacaaaatgaacctgaccgccggggtccagcctgctgtacaatcactgtgtgtttcatgtgtt

SEQ ID NO: 73754 - DNA, 110 bp, synthetic construct; identical to SEQ ID NO: 73752
  source 1..110: mol_type = other DNA

SEQ ID NO: 73755 - DNA, 110 bp, synthetic construct; identical to SEQ ID NO: 73753
  source 1..110: mol_type = other DNA

SEQ ID NO: 73756 - DNA, 110 bp, synthetic construct
  source 1..110: mol_type = other DNA
actctgagagtccatccgtcccattttaaggatgggaaaggcaaggcgagagaagtcagggacttgcccaaggtcatgaaatgcacagaaaaccacggaagaattagagg

SEQ ID NO: 73757 - DNA, 110 bp, synthetic construct
  source 1..110: mol_type = other DNA
gagggcgcgctgccctcaggcacccagttctcggggctgtgcacagggcctgcggaacctggagctgcagctgggagaaggcagtgtggccaggaggttctggactagag

SEQ ID NO: 73758 - DNA, 110 bp, synthetic construct
  source 1..110: mol_type = other DNA
aacctggagctgcagctgggagaaggcagtgtggccaggaggttctggactagagagatttggggtgtgtgacagtgagggccagatgccaaaggactctgcaccctcca

SEQ ID NO: 73759 - DNA, 110 bp, synthetic construct
  source 1..110: mol_type = other DNA
acttaacgtctctgggccactgtctcctcatccttaaaatgactggtttggaccagatctccatgctgaaagctgtccttttaaccccaccgtctggaactcccattctt

SEQ ID NO: 73760 - DNA, 110 bp, synthetic construct
  source 1..110: mol_type = other DNA
gatctccatgctgaaagctgtccttttaaccccaccgtctggaactcccattcttgaatgggaactttttgctggggctatgtggactccaagtttgtgttgatagaagt

SEQ ID NO: 73761 - DNA, 110 bp, synthetic construct
  source 1..110: mol_type = other DNA
gacccaggactgggtgtggggagtgggcggaggggacacatgaagggagggggaccgtgagctggtgctcgatgaagctgggaattctcttccctctgtttttgtatgta

SEQ ID NO: 73762 - DNA, 110 bp, synthetic construct
  source 1..110: mol_type = other DNA
tttattttcttgctgctgagttgtatgagctccttacatattttgggtaataactccatatcagatacatgatttgaaaatgttttctcccattgcatagtttacctatt

SEQ ID NO: 73763 - DNA, 110 bp, synthetic construct
  source 1..110: mol_type = other DNA
gaggagtttttgaggggaaagccaagatgggaaaggcctttcctatgtccaaccaggaaagatctgatggtctaaccccttccatctctctgagataatctggagttcag

SEQ ID NO: 73764 - DNA, 110 bp, synthetic construct
  source 1..110: mol_type = other DNA
gcctcagatgttttcaaacactacaacaaggtacaccaaggctccaagctgagcgcagccttcactgaggacactacagaaaggagggtgcggagaggacagtatcaggc

SEQ ID NO: 73765 - DNA, 110 bp, synthetic construct
  source 1..110: mol_type = other DNA
cacctcccctctctctctctctctctcacacccgccccagctgtccacacgcatacatcaccctccattcacgtgtgcggccagcccaaggacctggacaaagggacgct

SEQ ID NO: 73766 - DNA, 110 bp, synthetic construct
  source 1..110: mol_type = other DNA
catcaccctccattcacgtgtgcggccagcccaaggacctggacaaagggacgctccagaaggaggagaggagtgtggtgcagttcccatcaggaagaaggggctctgtt

SEQ ID NO: 73767 - DNA, 110 bp, synthetic construct
  source 1..110: mol_type = other DNA
tcctgaacacatttttgaccttttttgttttggttcacttagcctttctgtattttattaatgcactttcaaacactccccctgtcatgcagatttccttctgatcctgc

SEQ ID NO: 73768 - DNA, 110 bp, synthetic construct
  source 1..110: mol_type = other DNA
tattaatgcactttcaaacactccccctgtcatgcagatttccttctgatcctgcagtagatattccactactttcatcttcttggagcagttgctccttgaacctctga

SEQ ID NO: 73769 - DNA, 110 bp, synthetic construct
  source 1..110: mol_type = other DNA
tccaaaagtgtttttaatagttgcagagaagacagaggctgcccttacctctgcgaagagctaccctcagccacaccctccttgcagcaggctggtcagaaggaactaga

SEQ ID NO: 73770 - DNA, 110 bp, synthetic construct
  source 1..110: mol_type = other DNA
atctctcccctcccgccacgcacaccctgtcccatgccacaatttttcttctctgaacagaagggttatttcccttttgtttggttttgactttgaacccctgagattag

SEQ ID NO: 73771 - DNA, 110 bp, synthetic construct
  source 1..110: mol_type = other DNA
aacagaagggttatttcccttttgtttggttttgactttgaacccctgagattagtttttggcaagtttcctttgcactctacccaacagttttgaaagagtcgtcattt

SEQ ID NO: 73772 - DNA, 110 bp, synthetic construct
  source 1..110: mol_type = other DNA
tctgtttcctatgaaaggggtcccaggtcttctgtgcgtttgaaaactgagctggaatccggcagctctcgttggtcattttcccccccgatgtatttttgcctaaacac

SEQ ID NO: 73773 - DNA, 110 bp, synthetic construct
  source 1..110: mol_type = other DNA
ctcagccccaagagaacaatggagctggatctggagcaatcggataatgcaacgggaaaggacacccggcctaagtttctggtcccactgaactctaatttgagaccaca

SEQ ID NO: 73774 - DNA, 110 bp, synthetic construct
  source 1..110: mol_type = other DNA
tgtttccatggcaacccgagtttccaggttcccggcaggtggttcacatgctagtcatcagctgttgactcctctgcatcctgcactggcctgggaggtccctgaaggca

SEQ ID NO: 73775 - DNA, 110 bp, synthetic construct
  source 1..110: mol_type = other DNA
ccctgtgtgccaggctcaggcacccggggtaccatggaaatataccctgagagctagggtggagagttcacttaggaaagagactacagggactggaaacagaattaggg

SEQ ID NO: 73776 - DNA, 110 bp, synthetic construct
  source 1..110: mol_type = other DNA
agggtggagagttcacttaggaaagagactacagggactggaaacagaattagggctcaaggttgatgatctgaatttctgtcaagtttagaactcttgatcaacatccc

SEQ ID NO: 73777 - DNA, 110 bp, synthetic construct
  source 1..110: mol_type = other DNA
acctgtgtgttctcaggggaaatgagtcagaatgatccttcccaggcctggagcgttggagctggcatgggtgggtctaaacttggagtgagatcttggttcctctgctg

SEQ ID NO: 73778 - DNA, 110 bp, synthetic construct
  source 1..110: mol_type = other DNA
gacagaactgacaccactgagctggaacgtcagggtcacatcataatgagagcatgttgaatgggagacgtcccagtagtgcggtgggaaaatgcgttcagcccctttgc

SEQ ID NO: 73779 - DNA, 110 bp, synthetic construct
  source 1..110: mol_type = other DNA
acgtccctacacagggtcagcttagcccaccccgtaaaaggaaagacaagtgtaagctgccttggcccgtatctcaggagcaggaaagacaggtggggaaggacgaggtg

SEQ ID NO: 73780 - DNA, 110 bp, synthetic construct
  source 1..110: mol_type = other DNA
gattttaaggaggtgacatcatctctgtgaaactgtttcctcatctgtaaaataacaataactcatattaggtattcagttagctaactacaggcaagggacatttacta

SEQ ID NO: 73781 - DNA, 110 bp, synthetic construct
  source 1..110: mol_type = other DNA
caataactcatattaggtattcagttagctaactacaggcaagggacatttactacctctaatcctcacattgcgtaccatctctccattttatagaagggaaaactgag

SEQ ID NO: 73782 - DNA, 110 bp, synthetic construct
  source 1..110: mol_type = other DNA
tcgtctgctccccaagtccacggtgcattgacagtcaccacagctggcgtggatgggttggtcctgcagagagcagagccagaacagcagagcgctgagggtggcgcctt

SEQ ID NO: 73783 - DNA, 110 bp, synthetic construct
  source 1..110: mol_type = other DNA
tgaatagaaaggagagcatagcaggtggcttttattaacagggcataaattagggggcttgtccacttacggcttccgtctttctggagctgttctggctgcttccctgg

SEQ ID NO: 73784 - DNA, 110 bp, synthetic construct
  source 1..110: mol_type = other DNA
ggcttgtccacttacggcttccgtctttctggagctgttctggctgcttccctggaacctgtctctgactccagctgcagcctgggagctccaccacgcctcgctcacag

SEQ ID NO: 73785 - DNA, 110 bp, synthetic construct
  source 1..110: mol_type = other DNA
agtcaggtttgttactgctgagccacaataggaactctttttttttccccctaagcagccatcttaaagacgggctctctcctaatatgtaccagctaggacgagggggg

SEQ ID NO: 73786 - DNA, 110 bp, synthetic construct
  source 1..110: mol_type = other DNA
cagccatcttaaagacgggctctctcctaatatgtaccagctaggacgaggggggtagatggaaattcctggctgacctctcccttctcatcccatctcagctctgcccc

SEQ ID NO: 73787 - DNA, 110 bp, synthetic construct
  source 1..110: mol_type = other DNA
ggaattccctggtggtacagtgggttaaggatccagtgttgtccctgctgtggctttgtgatcccggccctcacttagttgcattaaggatctgtcatcgcccaaagctg

SEQ ID NO: 73788 - DNA, 110 bp, synthetic construct
  source 1..110: mol_type = other DNA
ttgtgatcccggccctcacttagttgcattaaggatctgtcatcgcccaaagctgcagtgtaggtctcagactcggctcggatctagtggtgacgtgaccaggttctcta

SEQ ID NO: 73789 - DNA, 110 bp, synthetic construct
  source 1..110: mol_type = other DNA
gtcactgccgtggtgcagcttcaatccccacaaaagaggccaaaaaaattttcattttgactaaggaaaaattctaaaaataggtgtagcaatatcagccagagcgtgtc

SEQ ID NO: 73790 - DNA, 110 bp, synthetic construct
  source 1..110: mol_type = other DNA
tcctggggacattcccttagcgtttagacggctgccttctccatctagatggccgtgtcttttcatggtctgccctctaggtgtgtctgtgcccttacctcctcttctta

SEQ ID NO: 73791 - DNA, 110 bp, synthetic construct
  source 1..110: mol_type = other DNA
tgtcttttcatggtctgccctctaggtgtgtctgtgcccttacctcctcttcttacagggataccagtcatactggcttagcacccatgccaatgacctcattttaagtt

SEQ ID NO: 73792 - DNA, 110 bp, synthetic construct
  source 1..110: mol_type = other DNA
tttcctcactctgtcccctgtgccccaaacactgctttgttccagtctccttcacaaatacacactcagcttacatgatgggcatctcagagaccccttcctgagcctcc

SEQ ID NO: 73793 - DNA, 110 bp, synthetic construct
  source 1..110: mol_type = other DNA
atagattttacgtgttgtcaccataaagaaaagaacagagaaaatgtgactgcatgaggcgatgggtgtgtcgatggacttgatcgtgatgggcagctcgtgatgtgtgc

SEQ ID NO: 73794 - DNA, 110 bp, synthetic construct
  source 1..110: mol_type = other DNA
gaggcgatgggtgtgtcgatggacttgatcgtgatgggcagctcgtgatgtgtgcgaaacagcgtgatgtacgcctgaaatacatgcaattccaaccgtcagttctacat

SEQ ID NO: 73795 - DNA, 110 bp, synthetic construct
  source 1..110: mol_type = other DNA
cctttttgctagctgaggccagatggaaatcttaagtaatgttttggcctctttttctgttagaaagaagcaagtcaggcccctaggaagcaccagcttttatcccagcc

SEQ ID NO: 73796 - DNA, 110 bp, synthetic construct
  source 1..110: mol_type = other DNA
aagaaatgacaaattgtagctcactttcttaattcgttgccatagttacatttttagaactgctaacttttcccccttctcatgtgtaaattactgccaccctgcagttt

SEQ ID NO: 73797 - DNA, 110 bp, synthetic construct
  source 1..110: mol_type = other DNA
ttcctgggaacttagtttatgtctgcctggaatcacggctgggtgatgaccggccttcagctgggacccagagacatgaagtgacacaagtacctccagcagctccccca

SEQ ID NO: 73798 - DNA, 110 bp, synthetic construct
  source 1..110: mol_type = other DNA
ggtgtggccctaaaaataaaaaaaaaagaaagaaaagaaaagaacccttcgaccagtgttttgaacaaatttttcttgttctatcctgttgcagattaagatttttgctc

SEQ ID NO: 73799 - DNA, 110 bp, synthetic construct
  source 1..110: mol_type = other DNA
gtgttttgaacaaatttttcttgttctatcctgttgcagattaagatttttgctccttagaacaggtgagatggacaggcctgggtggagtttcagcagtggctgctgtg

SEQ ID NO: 73800 - DNA, 110 bp, synthetic construct
  source 1..110: mol_type = other DNA
ctccagcagagaaacacgtggttccgacaacccctggttctcaaagctcggtgtgcagaagaacctcttgagtcactagtttaaaatgccttactccgagggtttttaga

SEQ ID NO: 73801 - DNA, 110 bp, synthetic construct
  source 1..110: mol_type = other DNA
aagttctccccccaccctccccaggcaatagggcctctctgaaggctccttggatgatggagatgttgccttccagcgaacccatcatcagctggaaacacacaccctat

SEQ ID NO: 73802 - DNA, 110 bp, synthetic construct
  source 1..110: mol_type = other DNA
gttcacagctggcatcctattgatggaaccaagctttaaacctggcagaattcaaaccggttctagggcgaatgtccagctcctcaggaaaggatgggaggtcatagcca

SEQ ID NO: 73803 - DNA, 110 bp, synthetic construct
  source 1..110: mol_type = other DNA
tacccagcgagctctctggatgggttcatacagtattttgttaagaattcaaagcaaggtgcattctcattctaacttttaaagcctttgaagtggatggggactgatct

SEQ ID NO: 73804 - DNA, 110 bp, synthetic construct
  source 1..110: mol_type = other DNA
ccagatgtgttcttctaaacccctcctctatctttggagttgcatcattggaaaagtgtgtgaagcagtgatccaacaccctgctgctttagggagagctgaaggctaga

SEQ ID NO: 73805 - DNA, 110 bp, synthetic construct
  source 1..110: mol_type = other DNA
gtgtgtgaagcagtgatccaacaccctgctgctttagggagagctgaaggctagaccagggaatgagttgcctggtcatagtggtaaacagttgtatgtgtgcatgtggg

SEQ ID NO: 73806 - DNA, 110 bp, synthetic construct
  source 1..110: mol_type = other DNA
gtctctaatagcagggttactggccttggctgagacccaagggaaaactctgcgggccctattacttggcggcctttaactcttacagaattgggagagaacactgacaa

SEQ ID NO: 73807 - DNA, 110 bp, synthetic construct
  source 1..110: mol_type = other DNA
gccctattacttggcggcctttaactcttacagaattgggagagaacactgacaaaagcgaggacatgatttcacggttacaaatgggttttgctgcttgctttcttctc

SEQ ID NO: 73808 - DNA, 110 bp, synthetic construct
  source 1..110: mol_type = other DNA
ttcttggtaaggaaaagcatggagggcccggaagagagcgaaaggtcttgaaggacttgacactgtttcacagaatcctcctggtctttgaggaaatgttgccaagttcc

SEQ ID NO: 73809 - DNA, 110 bp, synthetic construct
  source 1..110: mol_type = other DNA
cttgacactgtttcacagaatcctcctggtctttgaggaaatgttgccaagttccttaaagtagataaaactgatcaaaacagtgctgctgtggagattagataaggcgc

SEQ ID NO: 73810 - DNA, 110 bp, synthetic construct
  source 1..110: mol_type = other DNA
gcatgttacagaagaggaaacaaaggcttagcaagggcagcgaattgtctgaggtcaggcggctgtatgtgacagctctccgctacttcagagtccgtacctgtagttgt

SEQ ID NO: 73811 - DNA, 110 bp, synthetic construct
  source 1..110: mol_type = other DNA
caggcggctgtatgtgacagctctccgctacttcagagtccgtacctgtagttgtcatgaagccattcaggagagtggattacatctgtatacctcagtatattcttggc

SEQ ID NO: 73812 - DNA, 110 bp, synthetic construct
  source 1..110: mol_type = other DNA
tctgtttcactgcacaaaggctgttgaaagaaggattcttgaagaaagaggttccattcaaatggtatttgagtaagtccctcgttggatatactgtttctacagtgtat

SEQ ID NO: 73813 - DNA, 110 bp, synthetic construct
  source 1..110: mol_type = other DNA
attcaaatggtatttgagtaagtccctcgttggatatactgtttctacagtgtatggctctaatcaacaaaacatggccatactttcatgcaggtttttcttacgacttt

SEQ ID NO: 73814 - DNA, 110 bp, synthetic construct
  source 1..110: mol_type = other DNA
tggaagccttagtcctgagccagggccttgaggagacctcacattcgtttaaagttgccccccacgtgaattgaagcctgttcgttgctttctcccactggttctgcccc

SEQ ID NO: 73815 - DNA, 110 bp, synthetic construct
  source 1..110: mol_type = other DNA
tgccccccacgtgaattgaagcctgttcgttgctttctcccactggttctgcccctcctggatctaccgagatgaaattccatctccttgctctcgagatcgctccagac

SEQ ID NO: 73816 - DNA, 110 bp, synthetic construct
  source 1..110: mol_type = other DNA
gggaagaagccacgcttgaaggacaggccgggctctggaagagcgacaccttgaaccccggccaccctccgtacccactcactagtttctgtccgcatttgagctctgca

SEQ ID NO: 73817 - DNA, 110 bp, synthetic construct
  source 1..110: mol_type = other DNA
ccccggccaccctccgtacccactcactagtttctgtccgcatttgagctctgcaccatcaggtgtggggggtttttcgtttgcttctttctttccttttgtatgttcta

SEQ ID NO: 73818 - DNA, 110 bp, synthetic construct
  source 1..110: mol_type = other DNA
gaggagatcgttctaagcagagggaggaaggaacagcttgcttccttctgactttttacaggaaaatacaaaagaagagtgataaatcgaagaagcaatcattcagcaaa

SEQ ID NO: 73819 - DNA, 110 bp, synthetic construct
  source 1..110: mol_type = other DNA
caaataaaaccttgtgcctgctctcgagaggtttatgccatggtaatagaaactcctctttcttgtctctgttaaagcaaaacgtgcatttctgtcttctcagtgagttg

SEQ ID NO: 73820 - DNA, 110 bp, synthetic construct
  source 1..110: mol_type = other DNA
ctctttcttgtctctgttaaagcaaaacgtgcatttctgtcttctcagtgagttggtgatagttgaatccattggcttaatactgctcttttcccacaaacatatatttc

SEQ ID NO: 73821 - DNA, 110 bp, synthetic construct
  source 1..110: mol_type = other DNA
agatctgaaggcgttcatggccattagaattcccaaagtgccacgccgattcgcagcccagtgaactcttcaagcttcgtgaccttgtccgtgcttttgtattagccgga

SEQ ID NO: 73822 - DNA, 110 bp, synthetic construct
  source 1..110: mol_type = other DNA
ggtgggtcaccctgggcaaacatttattctagatttctggagcctagaggtctaaagtcaaggtatctacagggccgtgcttcctctgaaggctctagggaagactcttt

SEQ ID NO: 73823 - DNA, 110 bp, synthetic construct
  source 1..110: mol_type = other DNA
ctcacttactaagcttatggctgcgacttcctgattgtctgtaggtttcatccgcttccaaatgctttggcatcacgtgggatgtgcctgggcctctgggactcccagga

SEQ ID NO: 73824 - DNA, 110 bp, synthetic construct
  source 1..110: mol_type = other DNA
gagtcacaccctagaagcccagaggctcaggaatgggagtttctgggcattttgatggcggggaggtagatttgaatagaaaattatagctgtgtccctagatccgttct

SEQ ID NO: 73825 - DNA, 110 bp, synthetic construct
  source 1..110: mol_type = other DNA
tggcggggaggtagatttgaatagaaaattatagctgtgtccctagatccgttctccaactttacacagcccaagactgcccttctctacctggtggaatgtgggtgagt

SEQ ID NO: 73826 - DNA, 110 bp, synthetic construct
  source 1..110: mol_type = other DNA
ttttttttttttttttttttttttctggcaagttctgttttatgacatgtaggcagagtatttgctctgttgaatcctggtagctttttctccattttgctccagagcct

SEQ ID NO: 73827 - DNA, 110 bp, synthetic construct
  source 1..110: mol_type = other DNA
gagtatttgctctgttgaatcctggtagctttttctccattttgctccagagcctttattcattgtctcctttgttcattcagcaaacatttcttggacatcatggggat

SEQ ID NO: 73828 - DNA, 110 bp, synthetic construct
  source 1..110: mol_type = other DNA
tcggagaagttaaacttggaggtaccagaggacccagcaattccacccctaggttacgtacccaaaggaagtgataatgtctctccatgtaaacacctgtacatgaatgt

SEQ ID NO: 73829 - DNA, 110 bp, synthetic construct
  source 1..110: mol_type = other DNA
acgtacccaaaggaagtgataatgtctctccatgtaaacacctgtacatgaatgttcctagcagagttattcttaacagccccagtggaaacaacccaaatgtccatcaa

SEQ ID NO: 73830 - DNA, 110 bp, synthetic construct
  source 1..110: mol_type = other DNA
tgattggcgagtagaagcaagaaaacactctgtccagtattcttttactgaatacttaactagacacaggaagctgtactaggtactgcatatttctctcccataactag

SEQ ID NO: 73831 - DNA, 110 bp, synthetic construct
  source 1..110: mol_type = other DNA
ttaactagacacaggaagctgtactaggtactgcatatttctctcccataactagatatttgaaactcaagtgggaaaacccacagaggccgatggttggtcaaggctgg

SEQ ID NO: 73832 - DNA, 110 bp, synthetic construct
  source 1..110: mol_type = other DNA
ccaacaataagcaaattcacatacaatggacgccagatacatcctttttaaacagaaccaagctgaatccgagtgaccagcccgacagcagtgaacctaaaaagtaaaaa

SEQ ID NO: 73833 - DNA, 110 bp, synthetic construct
  source 1..110: mol_type = other DNA
agctctcctcctgatttatagacggctactttctcgctgtgtacacggcacatggccagaaagagagagagtcagccaagtgcggggtctcttctcataagggcaccaat

SEQ ID NO: 73834 - DNA, 110 bp, synthetic construct
  source 1..110: mol_type = other DNA
ccagaaagagagagagtcagccaagtgcggggtctcttctcataagggcaccaatctcactccaaaggccccatccgcatgacctcatctaaacttaattatcttccata

SEQ ID NO: 73835 - DNA, 110 bp, synthetic construct
  source 1..110: mol_type = other DNA
accatcccgaagctcagcccagtcatcaccgacatcccgggctggctgccttcccaaccagctcgctaatgtgggtccctcatacacgctttgccttcgctgctcatctg

SEQ ID NO: 73836 - DNA, 110 bp, synthetic construct
  source 1..110: mol_type = other DNA
aaccagctcgctaatgtgggtccctcatacacgctttgccttcgctgctcatctgtgaattttttgatggcctccactgtgtcatatgcctctctgtggtcacaccacac

SEQ ID NO: 73837 - DNA, 110 bp, synthetic construct
  source 1..110: mol_type = other DNA
aaatggacgctgattagcgtcaaccaatcagaagagagatcagttctaaagggccgggctggccttacaggcatcctgagcaacgttctgttcaggaaggtgtcctggtc

SEQ ID NO: 73838 - DNA, 110 bp, synthetic construct
  source 1..110: mol_type = other DNA
gggctggccttacaggcatcctgagcaacgttctgttcaggaaggtgtcctggtcacctcctaagaggatttcagtgccacctccagctccaccaactgttaaagcatat

SEQ ID NO: 73839 - DNA, 110 bp, synthetic construct
  source 1..110: mol_type = other DNA
gtttcaaggtttcaaggttggcagcatgattttcttttgtaacatcggtcctcactgggtaccagggattcctttggctctgtccgcaaacgaatttcttgcttcctccc

SEQ ID NO: 73840 - DNA, 110 bp, synthetic construct
  source 1..110: mol_type = other DNA
gtgcttaccccactgcatcaaagcaggaactcctctcattgtggttttgattttcatttctctgatggctaatgatgttgagcctattttcatgtgccctttggccattt

SEQ ID NO: 73841 - DNA, 110 bp, synthetic construct
  source 1..110: mol_type = other DNA
atttctctgatggctaatgatgttgagcctattttcatgtgccctttggccatttgtatttcttccttggggaaaagtctattcagctcctttgcctatctttcaattgg

SEQ ID NO: 73842 - DNA, 110 bp, synthetic construct
  source 1..110: mol_type = other DNA
atctggatttttaccaatgcaacacatttctaaatgacacacaaatgtggtcctgacacagctgtcgacctctgggtcagtccctcggctgcagtgggagagcctccctg

SEQ ID NO: 73843 - DNA, 110 bp, synthetic construct
  source 1..110: mol_type = other DNA
acacagctgtcgacctctgggtcagtccctcggctgcagtgggagagcctccctgaagtcaaggacacgggggacatgcaggacccagagggcccatccaacgctccccc

SEQ ID NO: 73844 - DNA, 110 bp, synthetic construct
  source 1..110: mol_type = other DNA
aacaaaacttcaatctttgctgcattcctttccactcagatctattccttctcttataatctctactgcaattagtggaaccaccattcaacccaggggaatgagtatga

SEQ ID NO: 73845 - DNA, 110 bp, synthetic construct
  source 1..110: mol_type = other DNA
cgatccctgccctcgctcagggggtcagaggtactggcgttatcatgagctgcagtgtaggtggcagacatggctcggatcctgcatggctgtggctgtggttgtggccg

SEQ ID NO: 73846 - DNA, 110 bp, synthetic construct
  source 1..110: mol_type = other DNA
ggcgttatcatgagctgcagtgtaggtggcagacatggctcggatcctgcatggctgtggctgtggttgtggccggtgattcgaccccaagcctgggaacgtccatatgc

SEQ ID NO: 73847 - DNA, 110 bp, synthetic construct
  source 1..110: mol_type = other DNA
ctcctcttgattgtccagttactgtgcttctcgggtcactccctgcccatctttccccaaggctgccttgcccggggctcagccccattcagacagcagtgagctcctgg

SEQ ID NO: 73848 - DNA, 110 bp, synthetic construct
  source 1..110: mol_type = other DNA
cccaaggctgccttgcccggggctcagccccattcagacagcagtgagctcctgggttcacccctttctctgccatcttcctcccctcaactgcggaccctgagtcgccg

SEQ ID NO: 73849 - DNA, 110 bp, synthetic construct
  source 1..110: mol_type = other DNA
gcccaagttcgagttcacctgggctgcatcgcttaccacacactcctcggctttccagcttccaaaatcgtgctgccgttgtctccttcattctgtgtattagttcttgc

SEQ ID NO: 73850 - DNA, 110 bp, synthetic construct
  source 1..110: mol_type = other DNA
ttctccctctctcagccccacccccttctgaccccagcctaggcaaggacaaatactctcgcccacccggcggctccaaacctccaaacgctgcctctgcccctaacatc

SEQ ID NO: 73851 - DNA, 110 bp, synthetic construct
  source 1..110: mol_type = other DNA
ctctcgcccacccggcggctccaaacctccaaacgctgcctctgcccctaacatcttagagggtctgggaacttgtactcccagccactcacaccccattccgagaggga

SEQ ID NO: 73852 - DNA, 110 bp, synthetic construct
  source 1..110: mol_type = other DNA
agcagagagatggggcttctttccaatactgccagctcaaatcccggttatgacgttcactggattagcttaagtcatgtgaccatactgcaaccaatgatttagacccg

SEQ ID NO: 73853 - DNA, 110 bp, synthetic construct
  source 1..110: mol_type = other DNA
tctcacttagtgccttttattatcgtttctctctgaagtcacctcgtgtatgtatgaatttgccagaatgctgcctgccagctccctgaggtcaaggggctaatctggtc

SEQ ID NO: 73854 - DNA, 110 bp, synthetic construct
  source 1..110: mol_type = other DNA
gaaaatgaaagaatgaaaaactacatgttccataaacactaaccaaaagagagctgggtcaactttaagacaaaagcattgtcagagccaaaaagagagaatgcataatg

SEQ ID NO: 73855 - DNA, 110 bp, synthetic construct
  source 1..110: mol_type = other DNA
gggtcaactttaagacaaaagcattgtcagagccaaaaagagagaatgcataatgataaaaggttcaattcaccaggaatatataaaaaggctgattcgatacccccaca

SEQ ID NO: 73856 - DNA, 110 bp, synthetic construct
  source 1..110: mol_type = other DNA
gtgacccagggctggtcacttacctagtctgtgcctttgttccacttctgtgcatgatctcactgccttggcttggagctagagggtcaaaaatgatcgtaaaagcctgg

SEQ ID NO: 73857 - DNA, 110 bp, synthetic construct
  source 1..110: mol_type = other DNA
aacccacagtttatgaccccaaaggcttatctatcacataagaagcgaatttatggaaggaaggtacagattccaccgattcaaagacatgttttctctcctccatgaaa

SEQ ID NO: 73858 - DNA, 110 bp, synthetic construct
  source 1..110: mol_type = other DNA
gggttgaacctgcatcctcatggatactagttaggttgattccctcagagccacaacaggaaacttctgattggtcaaagctttgatgagcctctgccctgaagctggat

SEQ ID NO: 73859 - DNA, 110 bp, synthetic construct
  source 1..110: mol_type = other DNA
acaggaaacttctgattggtcaaagctttgatgagcctctgccctgaagctggatagtgagtccatcgcttccatgtcatatgaagtcgtagtgggttgtgggtagtttt

SEQ ID NO: 73860 - DNA, 110 bp, synthetic construct
  source 1..110: mol_type = other DNA
gccttgtaaatagtttcaggtgagtgggtccagaaaagcagctaaactgttttgatgggtcatgggttgagtcgaggaaagacgagcatgtactttggaatcaaaccaag

SEQ ID NO: 73861 - DNA, 110 bp, synthetic construct
  source 1..110: mol_type = other DNA
ggagatagttagtaggtgggctgagatcaactgtgggtctcaggtaaggagcccgtgtggctgcctaaccatatttaaagcctgtaggtttgtgtttttcctaagctggc

SEQ ID NO: 73862 - DNA, 110 bp, synthetic construct
  source 1..110: mol_type = other DNA
ataataattacacctaccccataaagttgctgtatgtacccatgtgtggtacgtgagcacaatgtctgggacataatgggtgttattcataaaagctatcgttactgagt

SEQ ID NO: 73863 - DNA, 110 bp, synthetic construct
  source 1..110: mol_type = other DNA
agcacaatgtctgggacataatgggtgttattcataaaagctatcgttactgagttcagaatgaattccactaggctattccacctgaagtagagagagaggtggtttcc

SEQ ID NO: 73864 - DNA, 110 bp, synthetic construct
  source 1..110: mol_type = other DNA
atattggtgctttctagggaaagatcagtgagaattccctgtctgtatacacttatccagcagctatttaatgggtcgtgccctgtgccagatacgcgtgtgcactcaag

SEQ ID NO: 73865 - DNA, 110 bp, synthetic construct
  source 1..110: mol_type = other DNA
actacagagcttggactctgactttctggaaagctcatggtctcaggaggtctcagctgagcacatgaattaaatgcccggagatggaattaaattgcctgggtttggag

SEQ ID NO: 73866 - DNA, 110 bp, synthetic construct
  source 1..110: mol_type = other DNA
ctggaaagctcatggtctcaggaggtctcagctgagcacatgaattaaatgcccggagatggaattaaattgcctgggtttggagttcccgttgtggctcagtagttaac

SEQ ID NO: 73867 - DNA, 110 bp, synthetic construct
  source 1..110: mol_type = other DNA
ggattaattataaataagaaagggaccaagctagtggaaaggagaccacttatagggagacctcagaagatcataagagaaatataaatatttaatataaatgtgctttg

SEQ ID NO: 73868 - DNA, 110 bp, synthetic construct
  source 1..110: mol_type = other DNA
cactcagcgaggccagggatcgaacctgcacgttctcagccttatcaggtcccaaaaacacagctgggctttccaaactgcccagcaatggttggcacacatgcaccaag

SEQ ID NO: 73869 - DNA, 110 bp, synthetic construct
  source 1..110: mol_type = other DNA
aaacacagctgggctttccaaactgcccagcaatggttggcacacatgcaccaagacctaagaggtgatgccaaaatgactcgaggttcattatgctgcatttataataa

SEQ ID NO: 73870 - DNA, 110 bp, synthetic construct
  source 1..110: mol_type = other DNA
ccaataagccagctccagtgctcaagcccttatgactgttgcctgaaagagtctacaacagagctgagaggcagctcttgataggtgagatcccaagaggaagctccctt

SEQ ID NO: 73871 - DNA, 110 bp, synthetic construct
  source 1..110: mol_type = other DNA
ctccagccagaaatgcaggagacagtactgattcagactccttcttcctccctccccatccaaagtcaaggccgttccaagacgtgctgattctaacctcttcgataaca

SEQ ID NO: 73872 - DNA, 110 bp, synthetic construct
  source 1..110: mol_type = other DNA
gactccttcttcctccctccccatccaaagtcaaggccgttccaagacgtgctgattctaacctcttcgataacaattgttggagttcccgtcgtggcgcagtggttaac

SEQ ID NO: 73873 - DNA, 110 bp, synthetic construct
  source 1..110: mol_type = other DNA
cccaatcccttcccagtgtaggtttgcttttccttctgcatctttcctttgtgttgatggcaccagagtgatggctttcccttgcagctgagcctttgttcctgggcaga

SEQ ID NO: 73874 - DNA, 110 bp, synthetic construct
  source 1..110: mol_type = other DNA
gatggcaccagagtgatggctttcccttgcagctgagcctttgttcctgggcagagaggcaaacggggcccctcatgtttcattggtgctccccaaacacaagcttttcg

SEQ ID NO: 73875 - DNA, 110 bp, synthetic construct
  source 1..110: mol_type = other DNA
atggaaggtttcaaggtagggatggtaaatacagaaaatgttcaaagaagtcggattgtaaataggaagataaatatagaatatgaagtcggcttaagggaaacttctta

SEQ ID NO: 73876 - DNA, 110 bp, synthetic construct
  source 1..110: mol_type = other DNA
ttgtaaataggaagataaatatagaatatgaagtcggcttaagggaaacttcttatatggggatacagtagtaccagagctttagggtactcctataccaatagtaattc

SEQ ID NO: 73877 - DNA, 110 bp, synthetic construct
  source 1..110: mol_type = other DNA
ctttcagtgctggtgtttgaatgaacaatgaactctttggagttcatggcaatgccagaaccaagccgcagctccaatctacgccacagctcatggccaacgctggatcc

SEQ ID NO: 73878 - DNA, 110 bp, synthetic construct
  source 1..110: mol_type = other DNA
ccttcacttggcctccttttttgtttgtttcttgactgggtcaaatccttcccatcactctagctttcctctcgaagtttctgccactcgggacactcctcctccagaat

SEQ ID NO: 73879 - DNA, 110 bp, synthetic construct
  source 1..110: mol_type = other DNA
cagatgagaaaacggaggctcagggaggtaaatattctggccaagaccacacaactaggaagcagcagagtttaaattcaatccctggtctgtctggttcaaaattttac

SEQ ID NO: 73880 - DNA, 110 bp, synthetic construct
  source 1..110: mol_type = other DNA
cacctggcgtgcccatcatcctgaactacatgcagttccctttaacggcatgcccttaggggactgtgacccttacacgtgttggtctctttcccgaaacgcccattctc

SEQ ID NO: 73881 - DNA, 110 bp, synthetic construct
  source 1..110: mol_type = other DNA
ttaggggactgtgacccttacacgtgttggtctctttcccgaaacgcccattctcctctgtccatgagccaatttcaacgtgcccttcaagatcccctcgccccccacta

SEQ ID NO: 73882 - DNA, 110 bp, synthetic construct
  source 1..110: mol_type = other DNA
agcaaattgcatgtaaggtaaacgtaaggctgctgagacaggcctgcagtagacaaaggcaagacattgcctcatatgagaacaggtgtgtgtggagtgcagggaagcgg

SEQ ID NO: 73883 - DNA, 110 bp, synthetic construct
  source 1..110: mol_type = other DNA
gtgggtggggtggcctggacttaaagtgatggccaggatcaggtcacaaaggaatgcccgaccatctggcaagaagcttgttggcagtgggtgtgataggactttctgca

SEQ ID NO: 73884 - DNA, 110 bp, synthetic construct
  source 1..110: mol_type = other DNA
aggtgggcctctctctccttgagcaggtagctctcaagagcaaagcaggaggaagcgtctccttcctgctgcctctcccagactcaccagtcggatgtgacatctcacca

SEQ ID NO: 73885 - DNA, 110 bp, synthetic construct
  source 1..110: mol_type = other DNA
ggcctcagttttcagcctcttctgtatttctagctggatttcctttacagattgaagagttgttttaattgttctcatttttgtcttttaagggagaggtcagtgaggtt

SEQ ID NO: 73886 - DNA, 110 bp, synthetic construct
  source 1..110: mol_type = other DNA
tttgtctggctgccatttgccttcgcacaaacgcacggcatgaaatacgcccctgtaggaatcaacgctaggctgaccgtgctttcttgtgttccagatcgggcagtata

SEQ ID NO: 73887 - DNA, 110 bp, synthetic construct
  source 1..110: mol_type = other DNA
gccaggagggggccactccccccactcacctcggaggactcagaaggccagtcggccatggagatggtcatcttgtactgggtgtcgctggaagagagaaggcagcctgt

SEQ ID NO: 73888 - DNA, 110 bp, synthetic construct
  source 1..110: mol_type = other DNA
tatttaaaaaatgtttgaaccaatgtttaaaagtgagaaaacagctcataaaagtcaacttcctgattctctggaaaataagcagtcaggaggtatggtgacaccagggc

SEQ ID NO: 73889 - DNA, 110 bp, synthetic construct
  source 1..110: mol_type = other DNA
gacagctgaggcaccacgggaactcctgatcccacatccttgaaagcatagcccgggatgagctgcgggagggctgaaggacggggtggaggtccctgctctcacagcgg

SEQ ID NO: 73890 - DNA, 110 bp, synthetic construct
  source 1..110: mol_type = other DNA
ccctgcagagcatggaataagagaaactagaatgacaaccaggcaagaaaatgggaaagttgctacgagagacgacccttgctatagcttccagcaacaccaaagaacaa

SEQ ID NO: 73891 - DNA, 110 bp, synthetic construct
  source 1..110: mol_type = other DNA
ctggacggccacgtgaaagacccagagtcctttagctgctgcctcactcccttctcctgaaccatcctggagtggggctggaaacatctaggctctctgaggcaggaagc

SEQ ID NO: 73892 - DNA, 110 bp, synthetic construct
  source 1..110: mol_type = other DNA
tacagctaacccttatctgtaagttttgaatgtatgctgtttcttcctgtgtaaaaaaccattttcctacggaaacaaacaacgaggcccagtgtagtgggttgaacagt

SEQ ID NO: 73893 - DNA, 110 bp, synthetic construct
  source 1..110: mol_type = other DNA
cggaaactttgttgcctaacccctgtgtgttatttccttcattctgcccaggagctctaatcagagggatatgtagagccatgtccttcaagtccttcatctcttcttgt

SEQ ID NO: 73894 - DNA, 110 bp, synthetic construct
  source 1..110: mol_type = other DNA
tctaatcagagggatatgtagagccatgtccttcaagtccttcatctcttcttgtgtatggcagccaacctgcacctatggggtatctgggtggtaataacttcagataa

SEQ ID NO: 73895 - DNA, 110 bp, synthetic construct; identical to SEQ ID NO: 73893
  source 1..110: mol_type = other DNA

SEQ ID NO: 73896 - DNA, 110 bp, synthetic construct; identical to SEQ ID NO: 73894
  source 1..110: mol_type = other DNA

SEQ ID NO: 73897 - DNA, 110 bp, synthetic construct
  source 1..110: mol_type = other DNA
tcaaatccagccttcatatcagagacattggacacacacaagacaactatagataaattttctccaaaatttctcctgtttctcctaaattcacagggacaaagaaagtt

SEQ ID NO: 73898 - DNA, 110 bp, synthetic construct
  source 1..110: mol_type = other DNA
agggtcgtgtcaccactgtctaatttcagaatattttcatccttccaaatagaaacccaggacccatttcgcagtcactgcctgctccaccccccttcttctcaggccct

SEQ ID NO: 73899 - DNA, 110 bp, synthetic construct
  source 1..110: mol_type = other DNA
cccaggacccatttcgcagtcactgcctgctccaccccccttcttctcaggccctggcaaccactatttgtatggatttgccttttttggatgtttcatgtaaatgggat

SEQ ID NO: 73900 - DNA, 110 bp, synthetic construct
  source 1..110: mol_type = other DNA
tgttgattctccatgtgagagtctgttagctgatggaactgagaccaaagcaataagactccccaaattgcccactacaggaccctacaagtgaaaaagcaagaggatac

SEQ ID NO: 73901 - DNA, 110 bp, synthetic construct
  source 1..110: mol_type = other DNA
ttggataacacagcagagcaaaacgtcactgcattcctgaaggaacatcatgaaattgaggattttgtgatggtaggagatgacccttgacatttcatatcttggtgact

SEQ ID NO: 73902 - DNA, 110 bp, synthetic construct
  source 1..110: mol_type = other DNA
ttgaggattttgtgatggtaggagatgacccttgacatttcatatcttggtgacttgtgctgccgacaatctaatgagtagtcagtgtgtttatatactgtgcttaacat

SEQ ID NO: 73903 - DNA, 110 bp, synthetic construct
  source 1..110: mol_type = other DNA
gagtctttgaaatcccctggcccaagctttgctgtcgttcacaacacctgctttcttccactttgggtaacagaccccacacaaccggtccttgcagggcttgctctgca

SEQ ID NO: 73904 - DNA, 110 bp, synthetic construct
  source 1..110: mol_type = other DNA
ttccactttgggtaacagaccccacacaaccggtccttgcagggcttgctctgcattttctcctgctccctctgcaagggggatgaagggcttcccttctcaggttaggc

SEQ ID NO: 73905 - DNA, 110 bp, synthetic construct
  source 1..110: mol_type = other DNA
cgtatgtttctcacttccaatgtggacacataaagcggtgcttctttctcatcttgaatattggttgttagagcacttcagaaaatatggtaatttatgagaaaaacgta

SEQ ID NO: 73906 - DNA, 110 bp, synthetic construct
  source 1..110: mol_type = other DNA
agcacagtgattaccttggggaagggaggagctgggaaagaacatgagcctctaggaatgttctcaccttttgctgttgttgttgcctctttttgtgtgtgtgtatgtgt

SEQ ID NO: 73907 - DNA, 110 bp, synthetic construct
  source 1..110: mol_type = other DNA
ttccttctttgtaaacccaactatagtctatctctgagttgaatttggccccctgatgtaacagcctgtgcgtttgaccagatggcatgatttgggtggggaggagaaag

SEQ ID NO: 73908 - DNA, 110 bp, synthetic construct
  source 1..110: mol_type = other DNA
cctaacattaaataaccttttttgtctattgtcaaagctgtcaatttgtagtgaatgaatgactgagcgagcattgtcctgctcctccattttctgtgtgcatgtaaatt

SEQ ID NO: 73909 - DNA, 110 bp, synthetic construct; identical to SEQ ID NO: 73908
  source 1..110: mol_type = other DNA

SEQ ID NO: 73910 - DNA, 110 bp, synthetic construct
  source 1..110: mol_type = other DNA
tcagctctcactcttagcaaggaacagcatccttccgttctgcttaaatctgtgatctcttgtgatttgttctgatcttctcatcaaccctctggcaggcggcggaggta

SEQ ID NO: 73911 - DNA, 110 bp, synthetic construct
  source 1..110: mol_type = other DNA
gtttttgtttttaaggcagccttccctaagatgttgctgattgatttaaagacgggtctccctggcaaccgtattttatatgggtggattaggcaagcagaaaacagaac

SEQ ID NO: 73912 - DNA, 110 bp, synthetic construct
  source 1..110: mol_type = other DNA
tctcctcccatcaatcatggtgctacaagacagatggggagagagctcttctcgtgataagcaagttggcaccaaagggcttcctgaacgcagatttgcttggaggaggt

SEQ ID NO: 73913 - DNA, 110 bp, synthetic construct
  source 1..110: mol_type = other DNA
agttgtagaatagaagtgctgtctggtgtttctaagggcaagaaggctgagatgtgccttagggagaagacaggtgtagcagataagctagaaacaggcagggggcatgg

SEQ ID NO: 73914 - DNA, 110 bp, synthetic construct
  source 1..110: mol_type = other DNA
gttagtactccacaagttttagtagttgttctacaggattctgtgaagaactttgaggctttcatagagttttggactggaatggaagctagtgatcactgaatgtcccc

SEQ ID NO: 73915 - DNA, 110 bp, synthetic construct
  source 1..110: mol_type = other DNA
gtaaaaattctccaggcatgggctgctggaaggcaggagagcatggtgtttaaaagctgaatctcttaagtcagactacttggcttataaagtaactccaagcaacctgt

SEQ ID NO: 73916 - DNA, 110 bp, synthetic construct
  source 1..110: mol_type = other DNA
gctgaatctcttaagtcagactacttggcttataaagtaactccaagcaacctgtctctctaagcctaagtttccccatttgtaaaatgggtataatagtatcttcctca

SEQ ID NO: 73917 - DNA, 110 bp, synthetic construct
  source 1..110: mol_type = other DNA
tacagtgcctggtggctaagagctcaggctttgaggtcagtgatgccatttacaatctctgtgactttgggaggtctctcagttgctctgagcctcagtttcctcatcag

SEQ ID NO: 73918 - DNA, 110 bp, synthetic construct
  source 1..110: mol_type = other DNA
gattcaggaccaaaatctggatttgtcccttcgaggcttctgccgggactccgtactcactgtttcccatggaggctttgaaaagagctcaggtcagaagcctgatgtga

SEQ ID NO: 73919 - DNA, 110 bp, synthetic construct
  source 1..110: mol_type = other DNA
gtgcacggtaggaacacagttcttggtggctccttgcactgggattctggaggcgaaaggcaagagtggtcccccatggcatccttaccgttggagtgttttaaagactt

SEQ ID NO: 73920 - DNA, 110 bp, synthetic construct
  source 1..110: mol_type = other DNA
aagcagcaggcaacaagaaaactgttaggggacgctttaagctcaaagatcaatggtctgtattaggcaacagcaccgcacctgccatgtcgcctgcttcgtggcatccc

SEQ ID NO: 73921 - DNA, 110 bp, synthetic construct
  source 1..110: mol_type = other DNA
agaaggtctcacctcagtggaaagagacactcttaagagaagaacccctcccatgcacgaaaatctccctcctccgcacacatttccagttgcctctggacaagtccatc

SEQ ID NO: 73922 - DNA, 110 bp, synthetic construct
  source 1..110: mol_type = other DNA
agttacaattcattcattaattcagctaatctttgctgagcacctactatatatcaggtacttccttaagccctgggaacaaacacatgagggaacaaaacagacaaaat

SEQ ID NO: 73923 - DNA, 110 bp, synthetic construct
  source 1..110: mol_type = other DNA
gttagctggggaccactctcagctcccagaggccaccctcaagtccttgacatatggcctcctcctctcacaacatggaagctaacttagacactggacaagcatctgct

SEQ ID NO: 73924 - DNA, 110 bp, synthetic construct
  source 1..110: mol_type = other DNA
gatattaaaaaaaacaaaaaaccaaaaaacaaaaaaacaagctgtgtgccatggcagtgtcgggtattgggaaaacagtgataaactagaccaaccaggcctttgttctt

SEQ ID NO: 73925 - DNA, 110 bp, synthetic construct
  source 1..110: mol_type = other DNA
gtggaacaaggttcctgtccccagtttccttctcacttagaatgcttagcagcggagcagctgttcaacatcaacttgagagtgaagtcttgggactatggattcccagt

SEQ ID NO: 73926 - DNA, 110 bp, synthetic construct
  source 1..110: mol_type = other DNA
ttctggtctttcttggaaacttggaagatctgggaatgagctcctgctgggcactcttgatggctcctaatgactgccccttgtccccaggcaagcgccctctaggtctc

SEQ ID NO: 73927 - DNA, 110 bp, synthetic construct
  source 1..110: mol_type = other DNA
cccaccccagacgaaatgaataggaaactatagccgcagggtccagcaacctctattttcacataccctccatgtgaccctaatgcatgctcaagactgagaaccaccag

SEQ ID NO: 73928 - DNA, 110 bp, synthetic construct
  source 1..110: mol_type = other DNA
ttttcacataccctccatgtgaccctaatgcatgctcaagactgagaaccaccagcttgagtttattgtcaagcaagatagacccattcactgtgtattatgatatttaa

SEQ ID NO: 73929 - DNA, 110 bp, synthetic construct
  source 1..110: mol_type = other DNA
ctggaggcagccgagcaggaccccaggtcatcagctggtgagcattgagagctgccctccatccagaagacactcttcaatgtacaagaggaaagcctacgggtcctccg

SEQ ID NO: 73930 - DNA, 110 bp, synthetic construct
  source 1..110: mol_type = other DNA
tcttccagtacttctgagaccctcagtcctctgtgagcactaacctgatccttgtatttgtcatccctttggctttccgtatggttgaccacgtgagagaaatcctaccc

SEQ ID NO: 73931 - DNA, 110 bp, synthetic construct
  source 1..110: mol_type = other DNA
aagattgaaaggatgcaaaaggaacttgagcaatacctagtccagccctctcattttagagatgaggcatttgaggttggtgcttaccttgaagtgcttgcctcctcctc

SEQ ID NO: 73932 - DNA, 110 bp, synthetic construct
  source 1..110: mol_type = other DNA
ttagagatgaggcatttgaggttggtgcttaccttgaagtgcttgcctcctcctctttgccccttaaggtttagaccctgtaatacttcagcagctacccttcccagggt

SEQ ID NO: 73933 - DNA, 110 bp, synthetic construct
  source 1..110: mol_type = other DNA
aaaaaaaagatttcagccccaccgtctagctccagtaccctctcatcaaccccggacagagacagcggtaaggaagatacccgtataatatcaacaagtgtccccactag

SEQ ID NO: 73934 - DNA, 110 bp, synthetic construct
  source 1..110: mol_type = other DNA
ggtggatttgcagagaggtccgggttgagaatctggagccagcgctgaaattgttgctgcataaacacactctaggcttccagagctgcttcctgtgcaggtgggaagac

SEQ ID NO: 73935 - DNA, 110 bp, synthetic construct
  source 1..110: mol_type = other DNA
cttgcacaactgcttggaccttcccagccagggtgttcagaatgagaagtaacccgttgtgacagtgttggcgtatgcacccgcgtattcagacgtggagccctcgcctc

SEQ ID NO: 73936 - DNA, 110 bp, synthetic construct
  source 1..110: mol_type = other DNA
agctccttggatgacagcagccagcatggagctctttaattgacagggtcagacagcagtcattggcagagtggcagttattaactcttctgccgaagctgtggaaacta

SEQ ID NO: 73937 - DNA, 110 bp, synthetic construct
  source 1..110: mol_type = other DNA
tttggacttgatgactttttttttcttccccattttcccattgcaaagaatcacagaagctatttgattttgaaaggcaggaccccgaaacacaggaagtccaacagtat

SEQ ID NO: 73938 - DNA, 110 bp, synthetic construct
  source 1..110: mol_type = other DNA
ggtattatgtcaatcgagttcattacatgtgttattttccatttatttccaaatatgaaattggacaatctgtattcacaacttaggctgggtcatttactaggaatata

SEQ ID NO: 73939 - DNA, 110 bp, synthetic construct
  source 1..110: mol_type = other DNA
gaccgatgaggtggtcatgaagattagatgggctgtcatttcccagcacagttcccagcacttgatgtctggaactccgttgttcttctcccatcccactaatgacaaca

SEQ ID NO: 73940 - DNA, 110 bp, synthetic construct
  source 1..110: mol_type = other DNA
gggaacttaaaaaatatctatcccagccccagtcaaatccagatcccaggatggtggccttggcatcagcgtggtataaagcttccaggtgatttcagagtgcaccaggg

SEQ ID NO: 73941 - DNA, 110 bp, synthetic construct
  source 1..110: mol_type = other DNA
gcaaattgctgccctatttgtacatgaggccgatgcccagggatgctgggtttgttcttggaaagttaaagcccttccttcttagcttgtccagatgcctcccctgttat

SEQ ID NO: 73942 - DNA, 110 bp, synthetic construct
  source 1..110: mol_type = other DNA
tacagcagaaactggcacaacactgtaaatcaactacaccttaatgataataagaaaaaagtcccatgctttgtatgtaatgatggtctccgaaaagaagcgctggcttt

SEQ ID NO: 73943 - DNA, 110 bp, synthetic construct
  source 1..110: mol_type = other DNA
gtaacatcaggcattcaaagatctgctacagcccaggattgggcacgtcaagagaggcctcatacagagactctccaaggacagaaggcatttaacagctccaagtcccc

SEQ ID NO: 73944 - DNA, 110 bp, synthetic construct
  source 1..110: mol_type = other DNA
ggcctcatacagagactctccaaggacagaaggcatttaacagctccaagtccccttcattctgcaaacaagatgatgataggagtcctcaacgccctccctacctccca

SEQ ID NO: 73945 - DNA, 110 bp, synthetic construct
  source 1..110: mol_type = other DNA
gagggcagtatgatgaaatgcccagctccaaccactgtcaactcttggccactttgtcagctctgcccccaccccccagttcattaagaagcaaggcaggacatcgcagc

SEQ ID NO: 73946 - DNA, 110 bp, synthetic construct
  source 1..110: mol_type = other DNA
ctaatagatgagcaagtcatttggtgaggccttccagtttgtacccggggccaatgtctcaccctagttctgacccaggtgggcctcctgttggacccagactttatctt

SEQ ID NO: 73947 - DNA, 110 bp, synthetic construct
  source 1..110: mol_type = other DNA
caaccgcagcagttctgaggaaatggcctcaaggcgtgttgcagggcagggggtagagggcagatgtggggggacagtgggttatggtgacagctcttgcagtgagaggt

SEQ ID NO: 73948 - DNA, 110 bp, synthetic construct
  source 1..110: mol_type = other DNA
gagggcagatgtggggggacagtgggttatggtgacagctcttgcagtgagaggtgacaatgggacatattgggacagtggcagtgggggccgaggaaagagtgtggact

SEQ ID NO: 73949 - DNA, 110 bp, synthetic construct; identical to SEQ ID NO: 73947
  source 1..110: mol_type = other DNA

SEQ ID NO: 73950 - DNA, 110 bp, synthetic construct; identical to SEQ ID NO: 73948
  source 1..110: mol_type = other DNA

SEQ ID NO: 73951 - DNA, 110 bp, synthetic construct
  source 1..110: mol_type = other DNA
atgttaataaaacagtacctacgtgagaagcttgaaaaagaacatactacctaaaagtttgggatatgtggccaatgaaaacagtaaaagaagcacaggcatttgcatta

SEQ ID NO: 73952 - DNA, 110 bp, synthetic construct
  source 1..110: mol_type = other DNA
gaacaggactcataaccatcggcttttgttccgtatctctcaggcccgtggatgctgatgactctgacaggcagctcgctcatcctgcaggaaaggttgcaggaccctac

SEQ ID NO: 73953 - DNA, 110 bp, synthetic construct
  source 1..110: mol_type = other DNA
cagtgtcacctccccagagggagttcccttcacctctgaatcctcctcctccacttcctgtggcctcttctcctttcctttggaccatttatcacaacgtgcaggacagg

SEQ ID NO: 73954 - DNA, 110 bp, synthetic construct
  source 1..110: mol_type = other DNA
agaatcactcgatgcccgaggttccttagaggaagaagaaaagccaggagaacgcctgtctcttgaagcttgattctttggcagaatgacagacaaggtgacacccagtg

SEQ ID NO: 73955 - DNA, 110 bp, synthetic construct
  source 1..110: mol_type = other DNA
gtgcaatttttgccaggaattatgccaggggctggagaaacaacaataagaatatatataaagactattctcacgtagcttattgttagggtcttatatttattttactt

SEQ ID NO: 73956 - DNA, 110 bp, synthetic construct
  source 1..110: mol_type = other DNA
cgacaccagacccttttcacctcccaacctgtgcaggggatcaaatctcacctctgcagtgaccagagcttttgcaatcagattcctaacccaccggagccacagtggga

SEQ ID NO: 73957 - DNA, 110 bp, synthetic construct
  source 1..110: mol_type = other DNA
aaatcaactacacagtaatttttttttaaatgctagcttttgaagttctgctactttgaaacgttacttagctggtcacatgcaactcctcagtggggagtttctttctt

SEQ ID NO: 73958 - DNA, 110 bp, synthetic construct
  source 1..110: mol_type = other DNA
gggattccagtagaagatgatggtggctggcaagggtgggggcagggaaggcaccgagagctggtcagagtgtggacagatcaacagaggccttcagggagttcccatcg

SEQ ID NO: 73959 - DNA, 110 bp, synthetic construct
  source 1..110: mol_type = other DNA
cttctttttcttctgtgtcagagctgcaagctgtaggcactaagatggccctgcttcttcaagcaactgtttcattgaatgcgagggctctcaaggtggacgagaacttc

SEQ ID NO: 73960 - DNA, 110 bp, synthetic construct
  source 1..110: mol_type = other DNA
aacgatagccaaaccatggaaacaactcagctacccacccagagatgagtggcttacgaagatatagtacacacgtgtacacatgcacacacacacacactggactatca

SEQ ID NO: 73961 - DNA, 110 bp, synthetic construct
  source 1..110: mol_type = other DNA
catctgtgattcagcagtgaaggcaacacagtgatattttcaggcacagctaggctaagagagtggatcatccactaaccctggtctaaagaactgtcaaagtgggcttc

SEQ ID NO: 73962 - DNA, 110 bp, synthetic construct
  source 1..110: mol_type = other DNA
tgagaacaagcaagagcagctctggaaggcagccccgcagtcactcctggtccgcagcccagggccccttaggcagctctcccggggtctgatctcatgtccaccaagaa

SEQ ID NO: 73963 - DNA, 110 bp, synthetic construct
  source 1..110: mol_type = other DNA
aggatggtcctcaatctatttctgatctggcttgtgccttatccccttcatgaatttgcagaaagttcaacctaaatggagacgccaaagattacttcccaagtagcacc

SEQ ID NO: 73964 - DNA, 110 bp, synthetic construct
  source 1..110: mol_type = other DNA
ttgcagaaagttcaacctaaatggagacgccaaagattacttcccaagtagcacctcttagagaactttccctgtccaacccctggtagaggcagaaccatcactcgcat

SEQ ID NO: 73965 - DNA, 110 bp, synthetic construct
  source 1..110: mol_type = other DNA
ggttcaacccccggcccagcacagtgggttaaaggatccggagctacaacagcagcagcagctcagattccatccctggcccgggaacttctcagttctgctattcttcg

SEQ ID NO: 73966 - DNA, 110 bp, synthetic construct
  source 1..110: mol_type = other DNA
cagcagctcagattccatccctggcccgggaacttctcagttctgctattcttcggttgtaaacacacgtacgtgtgtagcccacacattttctgaagcactgaagtgag

SEQ ID NO: 73967 - DNA, 110 bp, synthetic construct
  source 1..110: mol_type = other DNA
ctaactgacaatcaatcaaaaccactcctcttcgcttagctctactgccaggtccacgcagtagctcagtgagtttagagtctagtaggggagacgccagttgccggaca

SEQ ID NO: 73968 - DNA, 110 bp, synthetic construct
  source 1..110: mol_type = other DNA
acgcagtagctcagtgagtttagagtctagtaggggagacgccagttgccggacaacactaagaaacgtatcactatcaacagggacatgtgctccaaagggcaagacca

SEQ ID NO: 73969 - DNA, 110 bp, synthetic construct; identical to SEQ ID NO: 73967
  source 1..110: mol_type = other DNA

SEQ ID NO: 73970 - DNA, 110 bp, synthetic construct; identical to SEQ ID NO: 73968
  source 1..110: mol_type = other DNA

SEQ ID NO: 73971 - DNA, 110 bp, synthetic construct
  source 1..110: mol_type = other DNA
accagcaaactcctattttttcttattctcttttttctttttcagtcacctccacagcatactgaatcccagccagagctgcaacctatgccccagatacagcaacactg

SEQ ID NO: 73972 - DNA, 110 bp, synthetic construct
  source 1..110: mol_type = other DNA
agcatactgaatcccagccagagctgcaacctatgccccagatacagcaacactggatccttaacccaccacactgggccaggcatctccacaaaaacaagccacatcat

SEQ ID NO: 73973 - DNA, 110 bp, synthetic construct
  source 1..110: mol_type = other DNA
cagcgtggctgtggccgtagcgattcaagctaaacaccctgaaaccatctggatgctgacccaggccacactgctcacccctcagcccgccatcctcggtcctcagtctg

SEQ ID NO: 73974 - DNA, 110 bp, synthetic construct
  source 1..110: mol_type = other DNA
ggttggtcatttgttattcccaattctccctcgctagctttccatgaacagcttggcgtatatttttcttccacctccctatgtacctatttttttcctgttattccaaa

SEQ ID NO: 73975 - DNA, 110 bp, synthetic construct
  source 1..110: mol_type = other DNA
gcgtatatttttcttccacctccctatgtacctatttttttcctgttattccaaatgcttccagaatgtgaactatttgataacatttgcagtatttggccatacgatcc

SEQ ID NO: 73976 - DNA, 110 bp, synthetic construct
  source 1..110: mol_type = other DNA
tgccttcctctccagctcacccccctccagcccctggacagacagacacacagatactgccctacccttcaggccgcctccccccctgtccgggagagcagctcctactc

SEQ ID NO: 73977 - DNA, 110 bp, synthetic construct
  source 1..110: mol_type = other DNA
actgccctacccttcaggccgcctccccccctgtccgggagagcagctcctactcaccagttgtcttggcagcgtccgggacggctgaggacgagagagaggcagagtca

SEQ ID NO: 73978 - DNA, 110 bp, synthetic construct; identical to SEQ ID NO: 73976
  source 1..110: mol_type = other DNA

SEQ ID NO: 73979 - DNA, 110 bp, synthetic construct; identical to SEQ ID NO: 73977
  source 1..110: mol_type = other DNA

SEQ ID NO: 73980 - DNA, 110 bp, synthetic construct
  source 1..110: mol_type = other DNA
atcaggggcagatccagctcagggcggagggcgtggggaggcgggggccagggacccaccttggtcttgtaacgcttgccgcactcaggacagggatagggcctctcgtc

SEQ ID NO: 73981 - DNA, 110 bp, synthetic construct
  source 1..110: mol_type = other DNA
cacaaaagcagcctcagagtcggtccccagcactgcctccgaatgcccgagaactgagttcctcgacccacaacggggagacagggaccctggccggtggccccttcgga

SEQ ID NO: 73982 - DNA, 110 bp, synthetic construct
  source 1..110: mol_type = other DNA
gagttcctcgacccacaacggggagacagggaccctggccggtggccccttcggacagaccctcttcactgtaaggtcccagactggggacgcgccctcattctgagtga

SEQ ID NO: 73983 - DNA, 110 bp, synthetic construct; identical to SEQ ID NO: 73981
  source 1..110: mol_type = other DNA

SEQ ID NO: 73984 - DNA, 110 bp, synthetic construct; identical to SEQ ID NO: 73982
  source 1..110: mol_type = other DNA

SEQ ID NO: 73985 - DNA, 110 bp, synthetic construct
  source 1..110: mol_type = other DNA
gctgcaggtgcggctctaaaaaaacgcaaagagagaaaaaaaggagtctaggagttccctggtggctcagcaggttaaggatagagcgttgtcactgccgtggcccaagt

SEQ ID NO: 73986 - DNA, 110 bp, synthetic construct
  source 1..110: mol_type = other DNA
tccctggtggctcagcaggttaaggatagagcgttgtcactgccgtggcccaagttcaatccctggcctgggaacctacgtgtgctgtgggtgcagccgtccctttactc

SEQ ID NO: 73987 - DNA, 110 bp, synthetic construct
  source 1..110: mol_type = other DNA
ttggagtataagacaccagccatgctatattcgcattgcaaaggagcattgctttattttagcaaattcagctctgagaaaacccctgcctccgggcttccccctcctcc

SEQ ID NO: 73988 - DNA, 110 bp, synthetic construct
  source 1..110: mol_type = other DNA
attttagcaaattcagctctgagaaaacccctgcctccgggcttccccctcctccctcacaggaactatcacattcctacagagctgggatttgaactggatatggggtc

SEQ ID NO: 73989 - DNA, 110 bp, synthetic construct
  source 1..110: mol_type = other DNA
acctgtgccacagcagtgacacaagccgctgcagtgacaatgccagatccttaaggcattgcaccatgagagaatgcctccaatctgtgtcttttgaatagagagtttaa

SEQ ID NO: 73990 - DNA, 110 bp, synthetic construct; identical to SEQ ID NO: 73989
  source 1..110: mol_type = other DNA

SEQ ID NO: 73991 - DNA, 110 bp, synthetic construct
  source 1..110: mol_type = other DNA
ggcatcagacccttgggggctggacattggtgcccctctctgctgatggctctgtggccctcctggatgtaggccttcatgctcacagctccattcatttcactgacctg

SEQ ID NO: 73992 - DNA, 110 bp, synthetic construct
  source 1..110: mol_type = other DNA
tctgtgcatctatgcttatatgtgcatacatgtacacatgtgtgtatgtatgcgtgggtatgtttaggattctcatcacgccagctctaagggttttcattcccagactc

SEQ ID NO: 73993 - DNA, 110 bp, synthetic construct
  source 1..110: mol_type = other DNA
tctccataatgttaggaacctatggaatagttgttttctaaagcaaggaccttccagctcaaaatacttggattccaagaaaacgactcacattatgtgcattgatactt

SEQ ID NO: 73994 - DNA, 110 bp, synthetic construct
  source 1..110: mol_type = other DNA
ttttgaattataaaacctttttctcatgtggatcatagacttttggaagctattgctctaatgaatagtgatgctacatagtagataattgttccccctgcccctcaccc

SEQ ID NO: 73995 - DNA, 110 bp, synthetic construct
  source 1..110: mol_type = other DNA
ctgatcaaggagcagacctttggaagatttatatgctaagaactataaaacattaatctagggagttcctgtcggggctcagtagtaacaaacctgactagtatccatga

SEQ ID NO: 73996 - DNA, 110 bp, synthetic construct; identical to SEQ ID NO: 73995
  source 1..110: mol_type = other DNA

SEQ ID NO: 73997 - DNA, 110 bp, synthetic construct
  source 1..110: mol_type = other DNA
gtcccctggaaagcgcggggcctggtgcaggcgggccacctgggcaggcattacccaggaaattctgctggcctggcccctccaccttcctgccggaggaagtggcatga

SEQ ID NO: 73998 - DNA, 110 bp, synthetic construct
  source 1..110: mol_type = other DNA
caggaaattctgctggcctggcccctccaccttcctgccggaggaagtggcatgagactgtgcgctcttattccgcattcctgcttagacggcttgaagagagacccgga

SEQ ID NO: 73999 - DNA, 110 bp, synthetic construct
  source 1..110: mol_type = other DNA
ctgctcctttctataactgagtagtagtctacagtatggatgtacccattcgtttaatcattcctctgctgtaggaggtttaagttgctcataggtttgggttattacat

SEQ ID NO: 74000 - DNA, 110 bp, synthetic construct
  source 1..110: mol_type = other DNA
aatcattcctctgctgtaggaggtttaagttgctcataggtttgggttattacatgtaaagctgctataaagaatcatgtaaatgattttgtgtgcacaaaagcttatat

SEQ ID NO: 74001 - DNA, 110 bp, synthetic construct
  source 1..110: mol_type = other DNA
tagaaatattcacccttatgccacctaaagccatctggtatattgtataccacattttggaaaactgccatgagcaacagggagccagggaaggctttccagcaagagaa

SEQ ID NO: 74002 - DNA, 110 bp, synthetic construct
  source 1..110: mol_type = other DNA
atcgtgttctatttagatactctggaatcacagggatggcatgcagctctacaaaatgcctcaaaccagccagcatctgtttcagggagaagcccatttattcccctccc

SEQ ID NO: 74003 - DNA, 110 bp, synthetic construct
  source 1..110: mol_type = other DNA
gaggaaggaatcttttgaggaacctgtgcatctttcaaggtacttttcagggcaagtagctaaagaaatgacccagtagaaccgcccttgcatctccttgccttgactag

SEQ ID NO: 74004 - DNA, 110 bp, synthetic construct
  source 1..110: mol_type = other DNA
gtagctaaagaaatgacccagtagaaccgcccttgcatctccttgccttgactagactctgtgcccactgtgttagtttcctaaggctgccataataaactaccacaaag

SEQ ID NO: 74005 - DNA, 110 bp, synthetic construct
  source 1..110: mol_type = other DNA
ctggcttcctggaggctgccatcaggaagggctagtctccccagagccccctgctcctcttctctctcctcctccaaagtgagctgttggaaggaattactgccctgacc

SEQ ID NO: 74006 - DNA, 110 bp, synthetic construct
  source 1..110: mol_type = other DNA
cctcttctctctcctcctccaaagtgagctgttggaaggaattactgccctgaccatcactttctttttttcttttctttttatggctgcacctacagcatatagaagtg

SEQ ID NO: 74007 - DNA, 110 bp, synthetic construct
  source 1..110: mol_type = other DNA
ctgtggcgggtggcaggcctgggtggccacccaggacccgcaagcaaccagcttatggggaaggtctacgctccatgattcaacccgggacgtgtccacccagagttacc

SEQ ID NO: 74008 - DNA, 110 bp, synthetic construct
  source 1..110: mol_type = other DNA
ggtgtggtaagaaaaaccttccagttaggaggcatccaagctcttggcaagccaagtgggaacaggaagcagggggaaggaggcggaggtgggtggctcaggcctggctc

SEQ ID NO: 74009 - DNA, 110 bp, synthetic construct
  source 1..110: mol_type = other DNA
gcagctggcagggaagtttcccattgcattttggctggcgtgcagtgggtatggccacacatttttccctgctgtgaagctgtccttttctcagattaggttaggggtga

SEQ ID NO: 74010 - DNA, 110 bp, synthetic construct
  source 1..110: mol_type = other DNA
gagcgaggccaggaattaaacctgcatccttgtggatcctagtgagatttgtttcctctgagctacgatgtgaactcctgaccgaactgcatttaaatttccaaacttct

SEQ ID NO: 74011 - DNA, 110 bp, synthetic construct
  source 1..110: mol_type = other DNA
ctctgagctacgatgtgaactcctgaccgaactgcatttaaatttccaaacttctctgagggatcataacatcactgatgttgcatcgtcctttgcaggaccacattgtc

SEQ ID NO: 74012 - DNA, 110 bp, synthetic construct
  source 1..110: mol_type = other DNA
gagtgaacagcaggtggggacagaaacattctgaggcatgaagagcacagtggcgggagctcaggttgggtgaagaatattcccgtcctccacatacttgatgtgcaggc

SEQ ID NO: 74013 - DNA, 110 bp, synthetic construct
  source 1..110: mol_type = other DNA
aaatggggctggtctgaattgagctgtggtattaagtgtaaactatacactggtttttaaagacagataaaagaatgtaaagtgtcttggagttcctgttgtggcacagc

SEQ ID NO: 74014 - DNA, 110 bp, synthetic construct
  source 1..110: mol_type = other DNA
ttgaatgttaaattatgtttcttattgcatgtctttctctggagtctctcaggatgaaagcacggatgtttccaagactgcttcattcatttttgttatgattcttattt

SEQ ID NO: 74015 - DNA, 110 bp, synthetic construct
  source 1..110: mol_type = other DNA
gaaagcacggatgtttccaagactgcttcattcatttttgttatgattcttattttttatttttttgcttttaaaggctacacctgcgggatatggaagttctcaggata

SEQ ID NO: 74016 - DNA, 110 bp, synthetic construct
  source 1..110: mol_type = other DNA
cacgatgttcatttttggctattccgatgggttttggaggcactgcatgaattaataatacaataagactcagaattgtattttgggggtagtctatttatttacttatt

SEQ ID NO: 74017 - DNA, 110 bp, synthetic construct
  source 1..110: mol_type = other DNA
taatctcagtgaaaacccctcacagtagcgtctgtcatttgacagctgaggagacgtgtcagtgaattcaggcggctcatccatggtcacgtctccagcaggtagtggag

SEQ ID NO: 74018 - DNA, 110 bp, synthetic construct
  source 1..110: mol_type = other DNA
gatggatcccgccccttccctggcgcagtttcacgttgctgaaggttctgtctctcctgccaccagcccttaagccaagcacgccctgcacccgtttggctctgggtcag

SEQ ID NO: 74019 - DNA, 110 bp, synthetic construct
  source 1..110: mol_type = other DNA
cctgccaccagcccttaagccaagcacgccctgcacccgtttggctctgggtcagctcctcttcgggtgtaaaagccttggcattcttgtctccgttttggctgaaggag

SEQ ID NO: 74020 - DNA, 110 bp, synthetic construct
  source 1..110: mol_type = other DNA
tccattgatttctagttttccgtagctggaacgttttggggcagaaggtatctttcccgggtgttcgttcttgcgcacttaagcgaggaaaactcttccttttgagttgt

SEQ ID NO: 74021 - DNA, 110 bp, synthetic construct
  source 1..110: mol_type = other DNA
cccgggtgttcgttcttgcgcacttaagcgaggaaaactcttccttttgagttgttttactttccagcgagaggatatttgatgcattggggggcgcggattgtaacatc

SEQ ID NO: 74022 - DNA, 110 bp, synthetic construct
  source 1..110: mol_type = other DNA
catcacatatagcctcacataaaccctcgggcctccctgtgaagatgaactgagctgtgtagtaatgatatgtgtcattgcccactttgttatacttcaataagatgcag

SEQ ID NO: 74023 - DNA, 110 bp, synthetic construct
  source 1..110: mol_type = other DNA
tgtgtagtaatgatatgtgtcattgcccactttgttatacttcaataagatgcagaaaaataaacagagtgtcacttttacctttagagcatcaccagcattcatgaaaa

SEQ ID NO: 74024 - DNA, 110 bp, synthetic construct; identical to SEQ ID NO: 74022
  source 1..110: mol_type = other DNA

SEQ ID NO: 74025 - DNA, 110 bp, synthetic construct; identical to SEQ ID NO: 74023
  source 1..110: mol_type = other DNA

SEQ ID NO: 74026 - DNA, 110 bp, synthetic construct
  source 1..110: mol_type = other DNA
aaacccagtgccactgattcctgtgtcttgctgaatccaaggttctgcttcctgatctagaaaatgcttctgttaatccccatgcatcacagaatttgtaagatgggcat

SEQ ID NO: 74027 - DNA, 110 bp, synthetic construct
  source 1..110: mol_type = other DNA
ccatccgcaggggctctgaaccagccatcggatgcctagctccttgagctctggggagcagggacattggatgcttcctgggtcatgtgattatgctacttttatcagag

SEQ ID NO: 74028 - DNA, 110 bp, synthetic construct
  source 1..110: mol_type = other DNA
ggtatacactgggggctgggaaagcactgaattggttttctgagatgctggaggaactttctgagatgctggagaggagggctggtgctgcagtgcggcaggcgatatcc

SEQ ID NO: 74029 - DNA, 110 bp, synthetic construct
  source 1..110: mol_type = other DNA
taaatgcatgcttctaatacactcggtgccttttccctgactgtacactgtacttccagctgagtcaaaaaacagtgcaaaagcaacctgcacttttttttttggtaaca

SEQ ID NO: 74030 - DNA, 110 bp, synthetic construct
  source 1..110: mol_type = other DNA
gtaactggaacaagcttatattcaagtttatactccagcaatgtatgtgtaattcaatttcttctcatccttgccagcattttgtgttgtcaccaatttctactttagtc

SEQ ID NO: 74031 - DNA, 110 bp, synthetic construct
  source 1..110: mol_type = other DNA
cagcaatgtatgtgtaattcaatttcttctcatccttgccagcattttgtgttgtcaccaatttctactttagtcacttttgatacttctgtagatattttacttttaat

SEQ ID NO: 74032 - DNA, 110 bp, synthetic construct
  source 1..110: mol_type = other DNA
cacccatgttcagctttctcctgttgtttatttgaatcagtcgactcctgaagctgaagtgaacagagttgtagagacagagataagggttcagggaacctgcagtgggt

SEQ ID NO: 74033 - DNA, 110 bp, synthetic construct
  source 1..110: mol_type = other DNA
gaagtgaacagagttgtagagacagagataagggttcagggaacctgcagtgggtttatcttccttcaaaagccaggaaagtaaagaggcccaggctgaggagctggtgc

SEQ ID NO: 74034 - DNA, 110 bp, synthetic construct
  source 1..110: mol_type = other DNA
tagtcttccttgaacaaggggagaattttctttgtgttatccccccttcggtgtttttccaccaacaaggagaaagtctttagatgaattccacaccaacagagggtttg

SEQ ID NO: 74035 - DNA, 110 bp, synthetic construct
  source 1..110: mol_type = other DNA
tttccaccaacaaggagaaagtctttagatgaattccacaccaacagagggtttgcttgaattccttctgtccctcatctctgctgactggatgaggcttgcatcttcag

SEQ ID NO: 74036 - DNA, 110 bp, synthetic construct
  source 1..110: mol_type = other DNA
ccaccagcacggccaggagcagtcaaatgagacccctgtgatcttagaaaggtaggccaaggagctgttctcctctcctggggaggagctgcgggctgcccttggaggag

SEQ ID NO: 74037 - DNA, 110 bp, synthetic construct
  source 1..110: mol_type = other DNA
caatggctaggagactgttactagagctgagggaatgggggagtagctttggagtcagacagctctcagggtacataatcctgccattggtgtgtccctgatgaaaacgt

SEQ ID NO: 74038 - DNA, 110 bp, synthetic construct
  source 1..110: mol_type = other DNA
cagacagctctcagggtacataatcctgccattggtgtgtccctgatgaaaacgtggactggttccgtgtacttgatgaaagcttttctgagactcagtttcttcatcca

SEQ ID NO: 74039 - DNA, 110 bp, synthetic construct
  source 1..110: mol_type = other DNA
gtcggtctgccacctgtgctgaggctgtggttggtccagattcctcgatggccgtgtccaaccaaacggggtccgagcagacaggacatccttcccctcacttcacagct

SEQ ID NO: 74040 - DNA, 110 bp, synthetic construct
  source 1..110: mol_type = other DNA
gtccaaccaaacggggtccgagcagacaggacatccttcccctcacttcacagctctttccaatgagtcccaactcacactagctctcctggcagctgctattttagcta

SEQ ID NO: 74041 - DNA, 110 bp, synthetic construct; identical to SEQ ID NO: 74039
  source 1..110: mol_type = other DNA

SEQ ID NO: 74042 - DNA, 110 bp, synthetic construct; identical to SEQ ID NO: 74040
  source 1..110: mol_type = other DNA

SEQ ID NO: 74043 - DNA, 110 bp, synthetic construct
  source 1..110: mol_type = other DNA
aacacccagcagacactgcaacagtgtctctgtaaacgaacatgtgaataatgaatccatccgaggacacgcctcctcgcatgttctcacctctgaccatttcctgagga

SEQ ID NO: 74044 - DNA, 110 bp, synthetic construct
  source 1..110: mol_type = other DNA
tccatccgaggacacgcctcctcgcatgttctcacctctgaccatttcctgaggagaggatgtggggttgagaaagttagggaaactccgggctcctggacagaaatcct

SEQ ID NO: 74045 - DNA, 110 bp, synthetic construct
  source 1..110: mol_type = other DNA
ccacttactcattggtgatgcaggtctgtgctgcatagctgcaaataccaggctccgttctgggctgggaaacaggatgagtcagctggagcctaggccttatgagctgg

SEQ ID NO: 74046 - DNA, 110 bp, synthetic construct
  source 1..110: mol_type = other DNA
ttggctgtgtagttcattagacacttgtctcatgaggtttagcaaagcctttcagatgagtcggattagacttgggcaggccttggcttcatctcactttgcccagattt

SEQ ID NO: 74047 - DNA, 110 bp, synthetic construct
  source 1..110: mol_type = other DNA
cacatgccggtgtgttgctggtccagatttctgagcctgtaccgcccccccaccaccccgggtgatcaggagacacaatttttaaaagtgaggggagtgtatgttcttgc

SEQ ID NO: 74048 - DNA, 110 bp, synthetic construct
  source 1..110: mol_type = other DNA
ccccgggtgatcaggagacacaatttttaaaagtgaggggagtgtatgttcttgccacctgagaaggggaccgtctctggggccataaagggaatgtggctgggaagggg

SEQ ID NO: 74049 - DNA, 110 bp, synthetic construct
  source 1..110: mol_type = other DNA
gatgtagctccctgtactccacagcagaacctcattgcctatctgttctacatgtgatagtctgcatctaccaactcctaactcccagtccatcccactcgttccctgtc

SEQ ID NO: 74050 - DNA, 110 bp, synthetic construct; identical to SEQ ID NO: 74049
  source 1..110: mol_type = other DNA

SEQ ID NO: 74051 - DNA, 110 bp, synthetic construct
  source 1..110: mol_type = other DNA
taattgcaagcacaatgtgttaatatttatcagttgcaatgagtactacagggagatattaaatatatttcagtgggaagtttgctggtgttttcccaacattgaaactt

SEQ ID NO: 74052 - DNA, 110 bp, synthetic construct
  source 1..110: mol_type = other DNA
ctgatcatgccaaaatgtgagttagccaggtattagcacagtgactgaggaacatagtacatctcatgattcagaactgtgagctttaatccactcagtaaatgatctgg

SEQ ID NO: 74053 - DNA, 110 bp, synthetic construct
  source 1..110: mol_type = other DNA
gagcaacccttccctgttaaagtactctttctaaaccccgggttgtttttgatagaaatgattgagtacatccagccctctttccctgtaattcttcaaggaggaagcag

SEQ ID NO: 74054 - DNA, 110 bp, synthetic construct
  source 1..110: mol_type = other DNA
aaatgattgagtacatccagccctctttccctgtaattcttcaaggaggaagcagttttaaagcctaagtgtttggagaaagctacttcataaccagggcctagattgcc

SEQ ID NO: 74055 - DNA, 110 bp, synthetic construct
  source 1..110: mol_type = other DNA
cagcccagggatggagcctaatggaaggggagggttggcgtgctggctgtaccatttcctgccaaggagctgacccttggtgtgtttcctctttgcccctgaaggtctgt

SEQ ID NO: 74056 - DNA, 110 bp, synthetic construct
  source 1..110: mol_type = other DNA
ttcctgccaaggagctgacccttggtgtgtttcctctttgcccctgaaggtctgtgtggtatcctcgtcccggccgcagtctcctgagccgctcttctccaggcaggaga

SEQ ID NO: 74057 - DNA, 110 bp, synthetic construct
  source 1..110: mol_type = other DNA
tccaggttactttcatgcaacaaaagatgccttttctgatctgtaaattcttcgttatattatttacttaaagctattctgcatatttgaaccaaacctttagtttgtgc

SEQ ID NO: 74058 - DNA, 110 bp, synthetic construct
  source 1..110: mol_type = other DNA
tcttcaaaatagatacttatgccaaaagctggcaaagccaacacttgtgagatgagattttgattttatggaaatgatattcgggaatgggtctgaatcttgccttggct

SEQ ID NO: 74059 - DNA, 110 bp, synthetic construct
  source 1..110: mol_type = other DNA
aaaattgtaagctccgtgaatgccagacccccggctagtggtatttatacccagcacagcagcacacttagtttccactcaacgcctgtttttgagctgataaatgtata

SEQ ID NO: 74060 - DNA, 110 bp, synthetic construct
  source 1..110: mol_type = other DNA
acagcagcacacttagtttccactcaacgcctgtttttgagctgataaatgtatacataaactgctttgttctaggaccaaatgttctctctcacacaggccatgctgag

SEQ ID NO: 74061 - DNA, 110 bp, synthetic construct; identical to SEQ ID NO: 74059
  source 1..110: mol_type = other DNA

SEQ ID NO: 74062 - DNA, 110 bp, synthetic construct; identical to SEQ ID NO: 74060
  source 1..110: mol_type = other DNA

SEQ ID NO: 74063 - DNA, 110 bp, synthetic construct
  source 1..110: mol_type = other DNA
ccagcccaggctggaactctgacaataggaccgtattctctgccactttcccttgcctcatgagatgggcacctcgtgaactgaattattcttggaccaacacagttccc

SEQ ID NO: 74064 - DNA, 110 bp, synthetic construct
  source 1..110: mol_type = other DNA
cctcatgagatgggcacctcgtgaactgaattattcttggaccaacacagttcccaatcctgggacagggctcaggagtgtgacatataaaggccagaaaacagcctgtg

SEQ ID NO: 74065 - DNA, 110 bp, synthetic construct
  source 1..110: mol_type = other DNA
agattcacaacttgaaaaaatactggtttcatgcgtagctcgcaggtacccacgaaaattcccttttgggggaagcctatgaggatggtggagttagaatgccctccttg

SEQ ID NO: 74066 - DNA, 110 bp, synthetic construct
  source 1..110: mol_type = other DNA
gcatagttctggatttcctaaaaagtcaaggatctctagctatgccttttgtcaaagggcttgaggtgacacaatggaaataacctgagaggtgtaggtattgatagttg

SEQ ID NO: 74067 - DNA, 110 bp, synthetic construct
  source 1..110: mol_type = other DNA
agggcttgaggtgacacaatggaaataacctgagaggtgtaggtattgatagttgttccatgatattatttagatgattatttagatagttgttcaactccttgcagaaa

SEQ ID NO: 74068 - DNA, 110 bp, synthetic construct
  source 1..110: mol_type = other DNA
aggtttgatggttaatgattatcattcccattttgtagatgagaaatctggggcccagagaggttaggtaattgatccaaagccacaaagcttagaagttgaggggctcg

SEQ ID NO: 74069 - DNA, 110 bp, synthetic construct
  source 1..110: mol_type = other DNA
cagagaggttaggtaattgatccaaagccacaaagcttagaagttgaggggctcgaatgccaacccaagtatggctctacgactgctactattcaaagaaaacatcatca

SEQ ID NO: 74070 - DNA, 110 bp, synthetic construct
  source 1..110: mol_type = other DNA
ttcccatttctgctccctggacaccaatcttgctgggccatcaactcactattgcctgtaaagcatcaatgatctaaaatattcacttaggaagctagggctccatggct

SEQ ID NO: 74071 - DNA, 110 bp, synthetic construct
  source 1..110: mol_type = other DNA
cacgacgggaactcctcaactcgttattgatgccacctcctcagtacattctcagctagtgctgaggagagagtatcctattcatttaaaaagcattcaatgtggagttt

SEQ ID NO: 74072 - DNA, 110 bp, synthetic construct; identical to SEQ ID NO: 74071
  source 1..110: mol_type = other DNA

SEQ ID NO: 74073 - DNA, 110 bp, synthetic construct; identical to SEQ ID NO: 74071
  source 1..110: mol_type = other DNA

SEQ ID NO: 74074 - DNA, 110 bp, synthetic construct; identical to SEQ ID NO: 74071
  source 1..110: mol_type = other DNA

SEQ ID NO: 74075 - DNA, 110 bp, synthetic construct
  source 1..110: mol_type = other DNA
gctctgcagaatagtagctgggtgagatatatcccatgagtttgcaaaacatcgcagaccttggccccatcttggaaagtcactccatatattaatatatcaaaggctct

SEQ ID NO: 74076 - DNA, 110 bp, synthetic construct
  source 1..110: mol_type = other DNA
tgctgggccttggcttcttcatctagggccttcctctgtcacagtattgtcacagagatcctttgaagcactaattaatcctgaaagcaccttgtaaaatgacacataca

SEQ ID NO: 74077 - DNA, 110 bp, synthetic construct
  source 1..110: mol_type = other DNA
taacacattagacgtctgcatcaaaggaatctcaaagagtgtgaggaaactggtttgaaacaccctacagctcagacccagtgcctttatgaggaggttctaggttggga

SEQ ID NO: 74078 - DNA, 110 bp, synthetic construct
  source 1..110: mol_type = other DNA
cgctcggaggcttgtacggttctgtggctctgcatctcatccattctctagagcatccttttctctgttctctgctgctccagtcagcttcatcttcgaaccctgtcctg

SEQ ID NO: 74079 - DNA, 110 bp, synthetic construct
  source 1..110: mol_type = other DNA
tccttttctctgttctctgctgctccagtcagcttcatcttcgaaccctgtcctgatttctttcttctattctgttggctcaaccaggataaggtaaattatgctgctgt

SEQ ID NO: 74080 - DNA, 110 bp, synthetic construct
  source 1..110: mol_type = other DNA
cgctggggtaggggagagagccagaggcccagggaggaatcatggcttggccgcgcctctctgtggtctgacattgcccagaatgatgggctgatgattagcaagtctga

SEQ ID NO: 74081 - DNA, 110 bp, synthetic construct
  source 1..110: mol_type = other DNA
tatggatcaggcacaagattaggaactgataacacagtgctttggaaatgattgattgcacctgaaataccatcctgttaagagagaaaagcataagcatacatgtaaac

SEQ ID NO: 74082 - DNA, 110 bp, synthetic construct
  source 1..110: mol_type = other DNA
ccagcagtgctgattttcacctttgcaaaaatattcaaggcagtgctcaaaggataaaggaaccagcttaaagggacttctgctggctaagttgagacaacttgagcatc

SEQ ID NO: 74083 - DNA, 110 bp, synthetic construct
  source 1..110: mol_type = other DNA
aaaggaaccagcttaaagggacttctgctggctaagttgagacaacttgagcatcggaaagagaacgataattatgatcattaagtctatgagagcattaaaatgaaact

SEQ ID NO: 74084 - DNA, 110 bp, synthetic construct
  source 1..110: mol_type = other DNA
gccacacaaggagtatgggttgctaatgcttaaaagactctctgatgaatttcagggaagagttttaaaggccaggtgagggagagaattgctgggtatgtgatcagctt

SEQ ID NO: 74085 - DNA, 110 bp, synthetic construct
  source 1..110: mol_type = other DNA
ctgcttccccacaaagccaccctctacttccttccccagcagcaaatacattatttttcactgatgttctgccccctgctgacagttttcttttccttaggtgagaatgg

SEQ ID NO: 74086 - DNA, 110 bp, synthetic construct
  source 1..110: mol_type = other DNA
tttcactgatgttctgccccctgctgacagttttcttttccttaggtgagaatggaaggctttgtctttcctttttaacactcttgtatcatttgtcctgatagttttca

SEQ ID NO: 74087 - DNA, 110 bp, synthetic construct
  source 1..110: mol_type = other DNA
attaggattcccacagaaaggcagtctttaatgtagagaaaaatgtatctgacatgccctatgatctattgtcattaaatagtcaaacaaactatttttgtccttagttc

SEQ ID NO: 74088 - DNA, 110 bp, synthetic construct
  source 1..110: mol_type = other DNA
cgacgggaactcccctaaactaatttttatatggacatttttcatgctcttttccacaaagacaatctatatattatgctcccgttggaatagctctccccagtaaggtc

SEQ ID NO: 74089 - DNA, 110 bp, synthetic construct
  source 1..110: mol_type = other DNA
acaaagacaatctatatattatgctcccgttggaatagctctccccagtaaggtctgtgcaagcagtataaatgctaatgtattgtggtctaatttttgctgaactgcat

SEQ ID NO: 74090 - DNA, 110 bp, synthetic construct
  source 1..110: mol_type = other DNA
ctctctcccattaccatcatcatcgtcatcatcttgcttactttctctgacaaagcaaactgccatgttgggagctactcaagggagagaaacatgtgacaagaaactga

SEQ ID NO: 74091 - DNA, 110 bp, synthetic construct
  source 1..110: mol_type = other DNA
caaactgccatgttgggagctactcaagggagagaaacatgtgacaagaaactgagcagtctctcgccaaagccaatgaggaattatggccctgttttgatagcccatga

SEQ ID NO: 74092 - DNA, 110 bp, synthetic construct
  source 1..110: mol_type = other DNA
gcctggcctgttgtgttgatttctctatctaaagcatcacctggtaaatgaatcaatttagctcaaaatcaactgtcttaacagagaaattactgttaatggaaactgag

SEQ ID NO: 74093 - DNA, 110 bp, synthetic construct
  source 1..110: mol_type = other DNA
agaggaatgttttctcccctacaccgcagacatcctgttccctaggaccagagactgagcctcaaaccgacactcaccaaagtgagcaggaacacgtggggcccagcatt

SEQ ID NO: 74094 - DNA, 110 bp, synthetic construct
  source 1..110: mol_type = other DNA
tcaaagactggatagagtaatttgtcattaggacaaattacattagcttctttctttggtactttttcaaagtgtctttccttggcactctttctatttcatctccttat

SEQ ID NO: 74095 - DNA, 110 bp, synthetic construct; identical to SEQ ID NO: 74094
  source 1..110: mol_type = other DNA

SEQ ID NO: 74096 - DNA, 110 bp, synthetic construct
  source 1..110: mol_type = other DNA
ccatcaagagagaatctgatgtgaggagaattgttacttgaaagcctgcagctaccacactttgaggatccaagagggcaccttcgatagacattctacctccgacagcc

SEQ ID NO: 74097 - DNA, 110 bp, synthetic construct
  source 1..110: mol_type = other DNA
ttccactatggagctgccctacaggacacacaatgctggagcatcactcagcttaggctggggcacatgcctgggtggttatgggaaacaagtcagccatgcgtgtagtt

SEQ ID NO: 74098 - DNA, 110 bp, synthetic construct
  source 1..110: mol_type = other DNA
ccaggtggagaggcagtttgggggtaattttgaccagattatacgaatttgtgaggttctatccatgtgttgtttcaggccctccagctacaagcaaagcttcttcttct

SEQ ID NO: 74099 - DNA, 110 bp, synthetic construct
  source 1..110: mol_type = other DNA
tcttcactttgatgaagaaaagacctgtcagagtatacatctctcaacatggaggatgagctacagatacaaaaggttagtgggctgaaggggtgaaacacacaattcca

SEQ ID NO: 74100 - DNA, 110 bp, synthetic construct
  source 1..110: mol_type = other DNA
ttgttcagaactcacatctttgtggccatgtttccggatccagggattaggttgcacaatctgacaatgggatgggatctgtaaaatccagggcagtatcagctgttgag

SEQ ID NO: 74101 - DNA, 110 bp, synthetic construct
  source 1..110: mol_type = other DNA
acaatctgacaatgggatgggatctgtaaaatccagggcagtatcagctgttgagaggacacacaagcaagctatgcatttctttctacatgctcttgatgtccctctta

SEQ ID NO: 74102 - DNA, 110 bp, synthetic construct
  source 1..110: mol_type = other DNA
tgccacagctgtggtgtaggtcatggccgtggctgggattggatccctggcctgggaacttccatatgccatggataagactcaaaatataggggtgatgttggtaatgc

SEQ ID NO: 74103 - DNA, 110 bp, synthetic construct
  source 1..110: mol_type = other DNA
gaacttccatatgccatggataagactcaaaatataggggtgatgttggtaatgccactgcttcccctcctctgtccctccccactccttcttattctttttcctcttat

SEQ ID NO: 74104 - DNA, 110 bp, synthetic construct
  source 1..110: mol_type = other DNA
tagaaatcaattatttacccccaaaatatgtctgcataaaaggtgaagagagctaaacagaatgggatggtctggggagcagttctcaaatattagcacacatcaaaatg

SEQ ID NO: 74105 - DNA, 110 bp, synthetic construct
  source 1..110: mol_type = other DNA
cagaggtaccctggagggagatgacttcagctattgctagtcaagaatgctgggattgggaggcataagatgaaatctagacactaggagaatggcaatcaggacagtgg

SEQ ID NO: 74106 - DNA, 110 bp, synthetic construct
  source 1..110: mol_type = other DNA
cggatgttagcctactgcaaaaatggtgaaatacaatatagcttgaaggtacatattaaactctttgagtaagggagatgggaaaataatctggtccctcgccctgctat

SEQ ID NO: 74107 - DNA, 110 bp, synthetic construct
  source 1..110: mol_type = other DNA
ctctgtgtgctacattctttttgaggggagagagagaggggtttaaatatgtgtgagtaactctatggaaggttaaggataaactgggaaactaaaataatataaactat

SEQ ID NO: 74108 - DNA, 110 bp, synthetic construct
  source 1..110: mol_type = other DNA
cccagtcctatttggcttactgcacaaattacatcatccagctttaccataattcatgctacagtttggggctctgaagatagtataggtagtggtataattgcacttga

SEQ ID NO: 74109 - DNA, 110 bp, synthetic construct
  source 1..110: mol_type = other DNA
atgctacagtttggggctctgaagatagtataggtagtggtataattgcacttgattttataacagttcttttttgatatgctggtttcaaaagctgttcatacatttat

SEQ ID NO: 74110 - DNA, 110 bp, synthetic construct
  source 1..110: mol_type = other DNA
caaactagggattaaacctgagctgcaactgcaacctattctgcaggttccacgttactggatccctaacccactgagccacaacaggaagtttctagaaaactccttga

SEQ ID NO: 74111 - DNA, 110 bp, synthetic construct
  source 1..110: mol_type = other DNA
tttaacaaaagacacattaaaatatcaggctgtgctctgacccatctggagttttcaccagcataaatccatgaaattttactggggggtgctaacaaatgactcaactc

SEQ ID NO: 74112 - DNA, 110 bp, synthetic construct
  source 1..110: mol_type = other DNA
caccagcataaatccatgaaattttactggggggtgctaacaaatgactcaactccaactactttcagttcctgaattttccctcaggattccaatgcccagataagaga

SEQ ID NO: 74113 - DNA, 110 bp, synthetic construct
  source 1..110: mol_type = other DNA
ctataatggttggtaaatagcttttaccatgattttcctgagtggctaccggctcattctgcccctgccagctggctattgagattaggaacacatcattgctccaaaaa

SEQ ID NO: 74114 - DNA, 110 bp, synthetic construct
  source 1..110: mol_type = other DNA
attctgcccctgccagctggctattgagattaggaacacatcattgctccaaaaacctcttaatcacatgtgcatgtatgtactgctaattgattttggcatgctgtgac

SEQ ID NO: 74115 - DNA, 110 bp, synthetic construct; identical to SEQ ID NO: 74113
  source 1..110: mol_type = other DNA

SEQ ID NO: 74116 - DNA, 110 bp, synthetic construct; identical to SEQ ID NO: 74114
  source 1..110: mol_type = other DNA

SEQ ID NO: 74117 - DNA, 110 bp, synthetic construct
  source 1..110: mol_type = other DNA
aaagttgaagaggcatctcacaatctgcacatggctttacttcccagaacaagttacagatactgttatttagatattcttttgctcatgaggaatgcttatcaatgtag

SEQ ID NO: 74118 - DNA, 110 bp, synthetic construct
  source 1..110: mol_type = other DNA
aagaaaaaaagaataacaatcaaatagctgtttacagagagatacacatgagacaacatttttcagggcaggcaatgaaaagatttcttgtgatccagttatgtgttggc

SEQ ID NO: 74119 - DNA, 110 bp, synthetic construct
  source 1..110: mol_type = other DNA
atccagctgaagcatctccaggaggcctcctctggatgtcccatcgaggctgcccttctgctacaacgcggaattggtgatccccgagcacgtggacatggctttgctca

SEQ ID NO: 74120 - DNA, 110 bp, synthetic construct
  source 1..110: mol_type = other DNA
tgagattgctattgccagtgccaatgctggccctgtccttgagtaaaagtcccattcctttaagactcatggcctccagctgagtcaccccaggtctttcctgattttac

SEQ ID NO: 74121 - DNA, 110 bp, synthetic construct
  source 1..110: mol_type = other DNA
tcctttaagactcatggcctccagctgagtcaccccaggtctttcctgattttactgacatctcgcccccctgggcaccggtattacagtcttcccgccttttccaaatc

SEQ ID NO: 74122 - DNA, 110 bp, synthetic construct
  source 1..110: mol_type = other DNA
acagagttgcagagaaagctagaccatgagatccggatgagggaaggggcctgtaagctgctggcagcctgctcccagcgagagcaggctctggaggccaccaagagcct

SEQ ID NO: 74123 - DNA, 110 bp, synthetic construct
  source 1..110: mol_type = other DNA
tggccccatgcactgggacacatggctttgggtggatgcattaaggctgtggaacaacaaaagggtcctcagtgacaaggagacagcataacttaccttgtgtatttttg

SEQ ID NO: 74124 - DNA, 110 bp, synthetic construct
  source 1..110: mol_type = other DNA
tcagtttttcccttggctgtaacagctctcctaccgtctgtatctcctgtttcatgaaacacacgttctaagcatggtctcagattcgcaacttcctccttcctaaaagt

SEQ ID NO: 74125 - DNA, 110 bp, synthetic construct
  source 1..110: mol_type = other DNA
caaaatacttctgggatggaagtggggacaccggagccttagacaaatggaacacattgccaatgagcagcgagtggtaaagctgttgaaggagaggctggagcaccttg

SEQ ID NO: 74126 - DNA, 110 bp, synthetic construct
  source 1..110: mol_type = other DNA
gaaatgaactatcaagccatgacaaaacatggaggagccttaaatgcatattattaattgagagagcccaatgtgaaaaagctacatactgcataattccaacagtatga

SEQ ID NO: 74127 - DNA, 110 bp, synthetic construct
  source 1..110: mol_type = other DNA
atgcttcctcctcagcgaggcttctgcctcaggagggtcatggagcagagtcagcaccctctagaactgcctcctctggaaatgcagctctgacctactttcagccacac

SEQ ID NO: 74128 - DNA, 110 bp, synthetic construct
  source 1..110: mol_type = other DNA
accctctagaactgcctcctctggaaatgcagctctgacctactttcagccacacctcttccaacctgtccacagcagagggcctgggaggggaggacagccaccaagtc

SEQ ID NO: 74129 - DNA, 110 bp, synthetic construct
  source 1..110: mol_type = other DNA
tcttccttatgccacccatccctccccataacgcatctcccgtctgtcttcacagtccccaccctgtgaagcccctcagtgctgccccagcagagggcagccccgacagg

SEQ ID NO: 74130 - DNA, 110 bp, synthetic construct
  source 1..110: mol_type = other DNA
tccccaccctgtgaagcccctcagtgctgccccagcagagggcagccccgacaggaagcagtcccgctccagtctgagctcagccctgagcagcgggctggagaagctca

SEQ ID NO: 74131 - DNA, 110 bp, synthetic construct
  source 1..110: mol_type = other DNA
gcacccagtcttaagcaaaatccacagactctctagaactagctaagtttgagtgttgggagagcatcccaggggtgagaagactaaaactcctgaatctggagttcttg

SEQ ID NO: 74132 - DNA, 110 bp, synthetic construct
  source 1..110: mol_type = other DNA
tttcttgccttgctagatcggtttctgtgtctgaacttttctctatatttcactgtgaaagaattcattaaatcactagaaaaagataatctttcacacagcaaaatgtt

SEQ ID NO: 74133 - DNA, 110 bp, synthetic construct
  source 1..110: mol_type = other DNA
agtgaggtctctccatctggcagcattggtggccagaactgcccacggtttgtgcaccaagactctgccatccctggagctttatcatgagccagttcaacagttttcca

SEQ ID NO: 74134 - DNA, 110 bp, synthetic construct
  source 1..110: mol_type = other DNA
atggctgtgcttggctggtaagatgggacttagggggctctgaagctggggcagggggcttatgaagggcccggaagaaggcaggcacccaggatcaggaaaaagtgggc

SEQ ID NO: 74135 - DNA, 110 bp, synthetic construct
  source 1..110: mol_type = other DNA
cccatcttgtgggacaggcccctttcgatggcccaggatgagccccctctcaaggcctagacacccatgggggttacagtacggaaaggagcaccctgatctccccatag

SEQ ID NO: 74136 - DNA, 110 bp, synthetic construct
  source 1..110: mol_type = other DNA
cctagacacccatgggggttacagtacggaaaggagcaccctgatctccccatagctgtgataggacagactacttccccaacacaacgatgaggtaggaagccgacaaa

SEQ ID NO: 74137 - DNA, 110 bp, synthetic construct
  source 1..110: mol_type = other DNA
actaaaagttgttgaattgtaaattataaataggtaaattgtatggtatatgaattatatcttggtaaagctgttattaagtggaaacaaccctatgtcctgtgggcacc

SEQ ID NO: 74138 - DNA, 110 bp, synthetic construct
  source 1..110: mol_type = other DNA
ggtgagagggacactttctgcctttggagcttataagatggtgtggaaacttcgtggactcgttcatttattcaaccagccaacatcttacagacaccacttacctgaac

SEQ ID NO: 74139 - DNA, 110 bp, synthetic construct
  source 1..110: mol_type = other DNA
ggactcgttcatttattcaaccagccaacatcttacagacaccacttacctgaacaatggctttggtcccagacacctcaagcacctgcccgctcctctgagtcccattg

SEQ ID NO: 74140 - DNA, 110 bp, synthetic construct
  source 1..110: mol_type = other DNA
gacccaagccacagcagtgacaatgccagctccttaaccagctgagccatgagtactctcatgatttccgatttccaatgaaatttttttgatgaaggaagattttattt

SEQ ID NO: 74141 - DNA, 110 bp, synthetic construct; identical to SEQ ID NO: 74140
  source 1..110: mol_type = other DNA

SEQ ID NO: 74142 - DNA, 110 bp, synthetic construct
  source 1..110: mol_type = other DNA
aaacctgcatcctcacagacaccaatcgggtttgttaccgttgagccacaacaggaacttcctcagtttgttttttatcttaactgttaacatttaagatttttgtgttt

SEQ ID NO: 74143 - DNA, 110 bp, synthetic construct; identical to SEQ ID NO: 74142
  source 1..110: mol_type = other DNA

SEQ ID NO: 74144 - DNA, 110 bp, synthetic construct
  source 1..110: mol_type = other DNA
ctttgccaagctgggggaaggtgagcaactggtatctttttgggattattgacccttaatactagagggatacccatgtaaaggtaaaggctcgggtctttcttttcttt

SEQ ID NO: 74145 - DNA, 110 bp, synthetic construct
  source 1..110: mol_type = other DNA
ttaatactagagggatacccatgtaaaggtaaaggctcgggtctttcttttctttcagagactcggttttgaagtatgtgcacaagtcagtgtgtatttttcctagagca

SEQ ID NO: 74146 - DNA, 110 bp, synthetic construct
  source 1..110: mol_type = other DNA
ggctgattttaaggaaacacttgaggccccctaatctcaccatctcacctctccgtcattcttggtcatcatctgaaatacaagtgtctccagaatctgttttatactta

SEQ ID NO: 74147 - DNA, 110 bp, synthetic construct
  source 1..110: mol_type = other DNA
tccacctgcttggatctctcgcagactttcaccatgtagacggggccacagtggatagcttccacagagtctcagcctcgatttacagaaggcagagatgggacctcaga

SEQ ID NO: 74148 - DNA, 110 bp, synthetic construct
  source 1..110: mol_type = other DNA
atatttggaccaaccccttggccggcccctcttcctgctcccgatcaccatccgtaggtcttcccagttgtctgacataaagctatgttcatcacttggttctgcagtgt

SEQ ID NO: 74149 - DNA, 110 bp, synthetic construct
  source 1..110: mol_type = other DNA
agcataatgtgtttcaaagaatgactgaagcccagtatggctggagcagaaaacgaagcagagactggctgaaggttaagctagagaggtaagtagggactagagcttac

SEQ ID NO: 74150 - DNA, 110 bp, synthetic construct
  source 1..110: mol_type = other DNA
gtggggatttggtggcctctataatgattggactgtgggacaaaggtaaggccactttcaagaaatcagaaattcagggatttcagggagctgccacctgttatcttgac

SEQ ID NO: 74151 - DNA, 110 bp, synthetic construct
  source 1..110: mol_type = other DNA
tttcaagaaatcagaaattcagggatttcagggagctgccacctgttatcttgactgcccgtggccttgaacccacaggctaaagtccacatctgccatccactctcttc

SEQ ID NO: 74152 - DNA, 110 bp, synthetic construct
  source 1..110: mol_type = other DNA
gagcacttaattttccattttagatcttgtacgttttcctgaggaagttttgggtggagtaatgtctgcttatttcccagaaggagtttccattgtccccaagctcatgt

SEQ ID NO: 74153 - DNA, 110 bp, synthetic construct
  source 1..110: mol_type = other DNA
ggagtaatgtctgcttatttcccagaaggagtttccattgtccccaagctcatgtggcttatttccctctctccatgggggcatcacagacacaaataatgttattttaa

SEQ ID NO: 74154 - DNA, 110 bp, synthetic construct
  source 1..110: mol_type = other DNA
atgtaattaaaaaattccttgcagcttctgtacctgagccaccatttatgctttccagaatcatgtgctgcagcttttgttttagcaacagctttttagagtagatgcat

SEQ ID NO: 74155 - DNA, 110 bp, synthetic construct
  source 1..110: mol_type = other DNA
cagaatcatgtgctgcagcttttgttttagcaacagctttttagagtagatgcatgttttatttttgtacttctggaactgctgtgctctctaagaatattttaccatgt

SEQ ID NO: 74156 - DNA, 110 bp, synthetic construct; identical to SEQ ID NO: 74154
  source 1..110: mol_type = other DNA

SEQ ID NO: 74157 - DNA, 110 bp, synthetic construct; identical to SEQ ID NO: 74155
  source 1..110: mol_type = other DNA

SEQ ID NO: 74158 - DNA, 110 bp, synthetic construct
  source 1..110: mol_type = other DNA
aaatgtgatgtgattcgaattgtgagaaagcaatctagtcaagagagctcaatgcttttcagatgctcgaggactggaaagggacagtgagggtctcaaatgccaaacat

SEQ ID NO: 74159 - DNA, 110 bp, synthetic construct
  source 1..110: mol_type = other DNA
gttgagagtttggcaaggtatccatagatttctcgaaagagacacaaattacaacctgttgacagctccttatattcatccaaattatcctcctaagggcaagtaagagg

SEQ ID NO: 74160 - DNA, 110 bp, synthetic construct
  source 1..110: mol_type = other DNA
ccctctcggtcccttgggaatccctgctataacctattgcactttcccttctgtaaacagtcctgccaggtgaccagctgtcaggggtgagacctgacatctttggacac

SEQ ID NO: 74161 - DNA, 110 bp, synthetic construct
  source 1..110: mol_type = other DNA
aacagtcctgccaggtgaccagctgtcaggggtgagacctgacatctttggacacatattctttccactggcttttcaacatctcagactccctgcccttttccaagtac

SEQ ID NO: 74162 - DNA, 110 bp, synthetic construct
  source 1..110: mol_type = other DNA
gttggaggcaagcactgtggcaatagcaagaaatgacaattaaacacaaaacagaagacatgagaaatgaagaagtaaaaatataaagacttaaaaattctctggaaaaa

SEQ ID NO: 74163 - DNA, 110 bp, synthetic construct
  source 1..110: mol_type = other DNA
tccatgaatctctcagatggctggtgcttggggttgtctggatgacatggttgttcaacggaaacagaagggcatcctccactcaagtttgtggtctctcagaccccaca

SEQ ID NO: 74164 - DNA, 110 bp, synthetic construct
  source 1..110: mol_type = other DNA
caacggaaacagaagggcatcctccactcaagtttgtggtctctcagaccccacagctgtgttcctccctgatgctgcctccccctctgttcctccacattcccagtgaa

SEQ ID NO: 74165 - DNA, 110 bp, synthetic construct
  source 1..110: mol_type = other DNA
gctcttcttaacttctgcttttaaattggcagccgttttctattgtgtttccaatgtgcctctgtgtgtagcttggagagaagagagaaagagaatatatgggtcaatat

SEQ ID NO: 74166 - DNA, 110 bp, synthetic construct
  source 1..110: mol_type = other DNA
agaaacagtgtggtcaatagcttttccatggagtgccgttccagaattcagcatatttgatttttgtcttttgaattctatgttgacgcctgtgaacttcactgccattg

SEQ ID NO: 74167 - DNA, 110 bp, synthetic construct
  source 1..110: mol_type = other DNA
tacaagttggaatctgccttcctcatgcaggctcacagaggtggtccccctcagctgcgggagtgctccctgctcacctctggatgtaataacaatgcattcttgaaatg

SEQ ID NO: 74168 - DNA, 110 bp, synthetic construct
  source 1..110: mol_type = other DNA
tgcgggagtgctccctgctcacctctggatgtaataacaatgcattcttgaaatggctccttgcttttgcctgtcggacgacaagaacctacatgtggtaataagtagtt

SEQ ID NO: 74169 - DNA, 110 bp, synthetic construct
  source 1..110: mol_type = other DNA
tgttcaccataaaacaaaatgatgaagctacttgaaggcatgtctcccttttctatagacatttatagagagatgtctcgggaacttgagacaagtgccatttccacccc

SEQ ID NO: 74170 - DNA, 110 bp, synthetic construct
  source 1..110: mol_type = other DNA
gcttctggcccaatctatctttgcaccctggtttcccatcaaccccctacaagaccctgtttctagaacagatgtgtgtggttctacttccaatcttttgcttgcatctt

SEQ ID NO: 74171 - DNA, 110 bp, synthetic construct
  source 1..110: mol_type = other DNA
cctgtttctagaacagatgtgtgtggttctacttccaatcttttgcttgcatctttctgcccattatgggtccaaattttctctttaaatattttcattcaaactctatt

SEQ ID NO: 74172 - DNA, 110 bp, synthetic construct
  source 1..110: mol_type = other DNA
atagagttagattggcctgggaggtcataaccattgtttgggcagagcttcccctaccagctgtccctcaagagtttgcttaccaatctccaaagtacgtcaggtgccca

SEQ ID NO: 74173 - DNA, 110 bp, synthetic construct
  source 1..110: mol_type = other DNA
accagctgtccctcaagagtttgcttaccaatctccaaagtacgtcaggtgcccattaccagcccacacaggtatattgggggagggaagagagttgaagaggaattgtg

SEQ ID NO: 74174 - DNA, 110 bp, synthetic construct
  source 1..110: mol_type = other DNA
actgttgtcctcacctaggcctgtttttgctgtgggctcacgtgttgcctttttacttgcattacattaaggacacccttgacctgacatcccagagtcctctcttttga

SEQ ID NO: 74175 - DNA, 110 bp, synthetic construct
  source 1..110: mol_type = other DNA
cttgcattacattaaggacacccttgacctgacatcccagagtcctctcttttgaagaggtaagatcttttggatttactttccctatgctgacttttttttttaattaa

SEQ ID NO: 74176 - DNA, 110 bp, synthetic construct
  source 1..110: mol_type = other DNA
ggtcacagtaagatgcaagtgggttgcctgactacatggctttacatgacctaaaataccttgcatacattttctgtggacaccatgaggctgatgacatctcacctccg

SEQ ID NO: 74177 - DNA, 110 bp, synthetic construct
  source 1..110: mol_type = other DNA
ataccttgcatacattttctgtggacaccatgaggctgatgacatctcacctccgacttactaagttttctttcctcagcgaggctggttgatgagattgggaaaaatgc

SEQ ID NO: 74178 - DNA, 110 bp, synthetic construct
  source 1..110: mol_type = other DNA
cagccagcccttgtgggtggtaatagtttattcccagtttacagtcagaccagctcccacccattgtggacagtgttggggataccttctgctggcaacttctcgggcac

SEQ ID NO: 74179 - DNA, 110 bp, synthetic construct
  source 1..110: mol_type = other DNA
agtttacagtcagaccagctcccacccattgtggacagtgttggggataccttctgctggcaacttctcgggcactagtatctggttgggagactaccttggaagggata

SEQ ID NO: 74180 - DNA, 110 bp, synthetic construct; identical to SEQ ID NO: 74178
  source 1..110: mol_type = other DNA

SEQ ID NO: 74181 - DNA, 110 bp, synthetic construct
  source 1..110: mol_type = other DNA
gtttattcccagtttacagtcagaccagctcccacccattgtggacagtgttggggataccttctgctggcaacttctcgggcactagtatctggttgggagactacctt

SEQ ID NO: 74182 - DNA, 110 bp, synthetic construct
  source 1..110: mol_type = other DNA
ctcccgtccatgcccccctagagcctatgtgacgccacacacacgaaaagtgttagcagtgcccctcatcaagcccagctgtgcttattcctagttggtgccatcaggtc

SEQ ID NO: 74183 - DNA, 110 bp, synthetic construct
  source 1..110: mol_type = other DNA
acatctgttgcctggtccttgccaggcctttccaggttctgctcagataaagagacagggacagcttgcagctaagcggttccgggggagagaacctacctcctggcact

SEQ ID NO: 74184 - DNA, 110 bp, synthetic construct
  source 1..110: mol_type = other DNA
cagggacagcttgcagctaagcggttccgggggagagaacctacctcctggcactcagggcagacagtgcggcgatcagagtgtgagtgcagctgctcggtggggaccag

SEQ ID NO: 74185 - DNA, 110 bp, synthetic construct; identical to SEQ ID NO: 74183
  source 1..110: mol_type = other DNA

SEQ ID NO: 74186 - DNA, 110 bp, synthetic construct; identical to SEQ ID NO: 74184
  source 1..110: mol_type = other DNA

SEQ ID NO: 74187 - DNA, 110 bp, synthetic construct
  source 1..110: mol_type = other DNA
gagaggagatggaatcttacagcttaaatgcggtgtctttgttgttgtttttaacatgaaggcttatgatccatatttaaacctacagatgcttcctttaaataccaata

SEQ ID NO: 74188 - DNA, 110 bp, synthetic construct
  source 1..110: mol_type = other DNA
atgaaggcttatgatccatatttaaacctacagatgcttcctttaaataccaatattcggcttgcatactcaaatggaaaggatgatgaacagaactttattcaaaatct

SEQ ID NO: 74189 - DNA, 110 bp, synthetic construct
  source 1..110: mol_type = other DNA
atggggagacctgtccctaaactaatgtaccctacgtccaggtctttattagtaatgttcactataaaatgggcacagagtgcttgaccactgtgagagaaaattcttta

SEQ ID NO: 74190 - DNA, 110 bp, synthetic construct
  source 1..110: mol_type = other DNA
tgttcactataaaatgggcacagagtgcttgaccactgtgagagaaaattctttaagagcaactttgggtcagatttctgcattagagttagaaatttttttattgacct

SEQ ID NO: 74191 - DNA, 110 bp, synthetic construct
  source 1..110: mol_type = other DNA
acacagatcttattcacttatatcttagttatctgcccccagactctatgcatcaatcatggtcttttgaaaagcttcatcccttgtggagggatagagtgtaagttcca

SEQ ID NO: 74192 - DNA, 110 bp, synthetic construct
  source 1..110: mol_type = other DNA
atcatggtcttttgaaaagcttcatcccttgtggagggatagagtgtaagttccatggggacagatatgtttgacagttttatgcaccgttgcatccccaagacctagca

SEQ ID NO: 74193 - DNA, 110 bp, synthetic construct
  source 1..110: mol_type = other DNA
tgttgggaggggtttaattttttttcctttgcctgaacaaatgctccgaaaagttcattttatatcagaacagctttttctcaaacctgttttaaagttaattatcaaaa

SEQ ID NO: 74194 - DNA, 110 bp, synthetic construct
  source 1..110: mol_type = other DNA
cattttatatcagaacagctttttctcaaacctgttttaaagttaattatcaaaagcttgcaacttctatctcttgcctatggatccctgctgggtttgttgtttcgctt

SEQ ID NO: 74195 - DNA, 110 bp, synthetic construct
  source 1..110: mol_type = other DNA
aacaggtacatagagtgaggtcccgaagaatacgagcacaggagcttctgtcctcatggaactagagtgtcaccttcctggcatgtggaagctttcatcaatggaagctg

SEQ ID NO: 74196 - DNA, 110 bp, synthetic construct
  source 1..110: mol_type = other DNA
gcttccccaagaagagcaatccaagagagcaagagccaggtggaagctaccctttctgtgacctagcctgggacattacctagcatcactacaaccacaaatttttatga

SEQ ID NO: 74197 - DNA, 110 bp, synthetic construct
  source 1..110: mol_type = other DNA
gtgttcaatgttctgacggttttctttggggaccccaaagcactgggtactcactctgtatatggcactgtgataggttctgtataggtttaagagtgaaatgttacctt

SEQ ID NO: 74198 - DNA, 110 bp, synthetic construct
  source 1..110: mol_type = other DNA
ctgtatatggcactgtgataggttctgtataggtttaagagtgaaatgttaccttaagaagaaaaagaaaaaggaaaagatggcatggtctcagtcttccacaactattt

SEQ ID NO: 74199 - DNA, 110 bp, synthetic construct
  source 1..110: mol_type = other DNA
gcactcacttcacactgaagcctgcttcacacctatgaactcagcttcaggtcttcagcctggatgggggcatagacttagcctgcgtgcagcacaggccagaagtgcca

SEQ ID NO: 74200 - DNA, 110 bp, synthetic construct
  source 1..110: mol_type = other DNA
cagcctggatgggggcatagacttagcctgcgtgcagcacaggccagaagtgccagaaatattctacccttaaaggagcctgaaccaataaagatagggatttggaagat

SEQ ID NO: 74201 - DNA, 110 bp, synthetic construct; identical to SEQ ID NO: 74199
  source 1..110: mol_type = other DNA

SEQ ID NO: 74202 - DNA, 110 bp, synthetic construct; identical to SEQ ID NO: 74200
  source 1..110: mol_type = other DNA

SEQ ID NO: 74203 - DNA, 110 bp, synthetic construct
  source 1..110: mol_type = other DNA
gggaactccgagttttttttaaacacagcccaagctttgctttatgacatcagttgccccagtttcattaactcatcctgtcgtagaactgtcatcagttatttttccaa

SEQ ID NO: 74204 - DNA, 110 bp, synthetic construct
  source 1..110: mol_type = other DNA
gccccagtttcattaactcatcctgtcgtagaactgtcatcagttatttttccaaagagctgtggttttttggtaggaaatggcatttagaggccaccatctcaaaaccg

SEQ ID NO: 74205 - DNA, 110 bp, synthetic construct
  source 1..110: mol_type = other DNA
gatggagataatctcaaggaactacaaaccacaaaagtttataataaatgttagtattcagagaaagtaagaatgacctgttgctgtaatagcatcaacctaatgatgca

SEQ ID NO: 74206 - DNA, 110 bp, synthetic construct
  source 1..110: mol_type = other DNA
tcacatttatttacccttacatacaggatctttaaattactttttcaaagaacatttacttctgtttacttggctaatcattgcgaatgactcttgagaagtagatagga

SEQ ID NO: 74207 - DNA, 110 bp, synthetic construct; identical to SEQ ID NO: 74206
  source 1..110: mol_type = other DNA

SEQ ID NO: 74208 - DNA, 110 bp, synthetic construct
  source 1..110: mol_type = other DNA
agtctccacaaaagcagaaaagctaaagggggagctgcctgctaaggctgttctgagaagtattaattcagaggaagcctaggtaccaaagcagcagctcagttacccca

SEQ ID NO: 74209 - DNA, 110 bp, synthetic construct
  source 1..110: mol_type = other DNA
agaagtattaattcagaggaagcctaggtaccaaagcagcagctcagttaccccaggtaatttacagcttccagagggagggacagagagctctcacactaggaagatag

SEQ ID NO: 74210 - DNA, 110 bp, synthetic construct
  source 1..110: mol_type = other DNA
ctacaggtcaaattgggtccactgactatttctatacatctcatgagctaagaatagtttctacatttttaaatagggggaaaaaatgaaagattattacaggacacatg

SEQ ID NO: 74211 - DNA, 110 bp, synthetic construct
  source 1..110: mol_type = other DNA
gaaggggggagcctagccctctgcaaatatgctggcttttactcggaaggcaaagcaaattgatgcaagcttcttcttaaaggctcagagaaaacggatacacaacaagg

SEQ ID NO: 74212 - DNA, 110 bp, synthetic construct
  source 1..110: mol_type = other DNA
caaattgatgcaagcttcttcttaaaggctcagagaaaacggatacacaacaaggtcaagggaaagatgctgtctatacaaacatgactgacctaatgcagctgctgacc

SEQ ID NO: 74213 - DNA, 110 bp, synthetic construct; identical to SEQ ID NO: 74211
  source 1..110: mol_type = other DNA

SEQ ID NO: 74214 - DNA, 110 bp, synthetic construct; identical to SEQ ID NO: 74212
  source 1..110: mol_type = other DNA

SEQ ID NO: 74215 - DNA, 110 bp, synthetic construct
  source 1..110: mol_type = other DNA
ctcagggttcaccattcatgtagccaaggaagtaaaacctttaattgcttccacccctctggagttgtaagaatcctccagattataaattcatgctgagaccaggagcc

SEQ ID NO: 74216 - DNA, 110 bp, synthetic construct
  source 1..110: mol_type = other DNA
atcttcaaactatatccagaatttgactgtttcacactacttctatttttgtccccctaacccaagccaccactatgcctggattattaactgtagcctcctaactgcac

SEQ ID NO: 74217 - DNA, 110 bp, synthetic construct
  source 1..110: mol_type = other DNA
cctaacccaagccaccactatgcctggattattaactgtagcctcctaactgcacagcttccctcttcctttgtcaccctccttgctcagctctcagcagagattaatat

SEQ ID NO: 74218 - DNA, 110 bp, synthetic construct
  source 1..110: mol_type = other DNA
ttgtattgagagctcagtgttagctgctgattcactatttatattgggtggtgaggaaagactcacctgaggaagtgacatttgagctgaaacctaaatgatgagtagaa

SEQ ID NO: 74219 - DNA, 110 bp, synthetic construct
  source 1..110: mol_type = other DNA
aaattcgaactgcacaagcttctgaccacctacacatagggacccacatcccagccagacctcataacaacaatgaaaactctaagctggtatcatagactgactgactt

SEQ ID NO: 74220 - DNA, 110 bp, synthetic construct
  source 1..110: mol_type = other DNA
atagggacccacatcccagccagacctcataacaacaatgaaaactctaagctggtatcatagactgactgacttaagcagcagatgtatattttctcactgatctgtag

SEQ ID NO: 74221 - DNA, 110 bp, synthetic construct
  source 1..110: mol_type = other DNA
tctgcatcttggcggcggttccacctgagcgtgaggaaaagaagaaaatgagtgagatttgggtacaaagaagggctacagcgggccccggggcggagaaagacctagag

SEQ ID NO: 74222 - DNA, 110 bp, synthetic construct
  source 1..110: mol_type = other DNA
gatttgggtacaaagaagggctacagcgggccccggggcggagaaagacctagagcacacactcaccacagatggcggatccgaaaggaagggcgctccgacggtccaag

SEQ ID NO: 74223 - DNA, 110 bp, synthetic construct
  source 1..110: mol_type = other DNA
gactgtaatgcaaattctgccacaactggcaggtacctgggagcttatctggcctgaggtgatcccaaggtcccttcagtctgggtctagagactggagacagcaaaaat

SEQ ID NO: 74224 - DNA, 110 bp, synthetic construct
  source 1..110: mol_type = other DNA
attattccttctctctctagaattctctacagcagtgttgggggaaagaccatgacgttctgattgtatctgtcttgaagaaggatcctttctttgtgtgtgttccaaga

SEQ ID NO: 74225 - DNA, 110 bp, synthetic construct
  source 1..110: mol_type = other DNA
tgtttgatctccgccctggccctcatagtccaaggtggcagcagaatgcaggaaggggtgaaaaagcttgcaaatcccaactgcctcctaaggaagactctcagaagctg

SEQ ID NO: 74226 - DNA, 110 bp, synthetic construct
  source 1..110: mol_type = other DNA
gggtgaaaaagcttgcaaatcccaactgcctcctaaggaagactctcagaagctgccacaagacaatttcacttatacctcattgtccaaaacttagtcatgtggccatg

SEQ ID NO: 74227 - DNA, 110 bp, synthetic construct
  source 1..110: mol_type = other DNA
cagtctgagctgtagcttctcctggagtttacgggcagccagagcccaaggtgggctgagaactcagtggaatggtcttgggtgactggccagagcatctaccacctctc

SEQ ID NO: 74228 - DNA, 110 bp, synthetic construct
  source 1..110: mol_type = other DNA
ctgagaactcagtggaatggtcttgggtgactggccagagcatctaccacctctctgttgggactgagaatgagcagttctgcatgcatatccttatttatttatttatt

SEQ ID NO: 74229 - DNA, 110 bp, synthetic construct
  source 1..110: mol_type = other DNA
gagccacgacgggaactcccaataatgacatttttaaaatgtcctggatttggcagacagggagccactggtggccttcctcacaagagtttcaggggaaagtaaaggga

SEQ ID NO: 74230 - DNA, 110 bp, synthetic construct
  source 1..110: mol_type = other DNA
ggcccctcacccttttactcacatttcaggtgccagtcacaaacccaggttatccccaaccagctagaccagaggttccaataaccccccctccttgggttctattaatt

SEQ ID NO: 74231 - DNA, 110 bp, synthetic construct
  source 1..110: mol_type = other DNA
ccatatctgtttcttaatgatagtgtggaccaatcttgattttttttccacgtaaattttagtattagtttgtcagttctacagaaaagggccagtttggactttcattg

SEQ ID NO: 74232 - DNA, 110 bp, synthetic construct
  source 1..110: mol_type = other DNA
ttccacgtaaattttagtattagtttgtcagttctacagaaaagggccagtttggactttcattggaagtgtatgaaatataaatcaatttgggtaaaattggcctttca

SEQ ID NO: 74233 - DNA, 110 bp, synthetic construct; identical to SEQ ID NO: 74231
  source 1..110: mol_type = other DNA

SEQ ID NO: 74234 - DNA, 110 bp, synthetic construct; identical to SEQ ID NO: 74232
  source 1..110: mol_type = other DNA

SEQ ID NO: 74235 - DNA, 110 bp, synthetic construct
  source 1..110: mol_type = other DNA
ccagaatacttttgacaatagtagagatgctagtggaaaccaattcccacttaagctactacaaatgtgcatacttctgaactaagaaatagaaagtagcttattgtttt

SEQ ID NO: 74236 - DNA, 110 bp, synthetic construct
  source 1..110: mol_type = other DNA
ccacactttcggattttataattctcctcaatctcgtccaatggtataataggtataaacaattcagaagaatcttttctagatatatctttatctgatggccttatttg

SEQ ID NO: 74237 - DNA, 110 bp, synthetic construct
  source 1..110: mol_type = other DNA
taaacaattcagaagaatcttttctagatatatctttatctgatggccttatttgacccaagaaatagctagggaaaaaaaaaaggtggatcctgaactcttgagacaaa

SEQ ID NO: 74238 - DNA, 110 bp, synthetic construct
  source 1..110: mol_type = other DNA
aaaaggtaaaacatatttgtttcttctgtgtttttgatccccttctgaagactcattttgtttggagccatttggtttatcaatttttataaggtgaatcctatcttcta

SEQ ID NO: 74239 - DNA, 110 bp, synthetic construct
  source 1..110: mol_type = other DNA
ttttgtttggagccatttggtttatcaatttttataaggtgaatcctatcttctagggagcttataatctaagagtgaggtggtttattgtgtgtcccggaggaatatac

SEQ ID NO: 74240 - DNA, 110 bp, synthetic construct
  source 1..110: mol_type = other DNA
tggcaaatgctacataaggcttcagtctgaagggttcatctcctgtcatctgacttgttggttggaccactttcatccttagtagctccttacccatccttagtattata

SEQ ID NO: 74241 - DNA, 110 bp, synthetic construct
  source 1..110: mol_type = other DNA
tgttggttggaccactttcatccttagtagctccttacccatccttagtattataagaagtctggcattagtaataaaataagaaagacaagaatacttaactaaattgt

SEQ ID NO: 74242 - DNA, 110 bp, synthetic construct; identical to SEQ ID NO: 74240
  source 1..110: mol_type = other DNA

SEQ ID NO: 74243 - DNA, 110 bp, synthetic construct; identical to SEQ ID NO: 74241
  source 1..110: mol_type = other DNA

SEQ ID NO: 74244 - DNA, 110 bp, synthetic construct
  source 1..110: mol_type = other DNA
aaggccctctcagtttgtgcagttggtctgtaacccaagaaaagacaataaatcatttaaccatatattataagattacatagcaataattccattttcacagactgaat

SEQ ID NO: 74245 - DNA, 110 bp, synthetic construct
  source 1..110: mol_type = other DNA
tttaaccatatattataagattacatagcaataattccattttcacagactgaatgaaagcaatcctatcaccgcactctacctgaaatcaattctggtgcctggtattt

SEQ ID NO: 74246 - DNA, 110 bp, synthetic construct
  source 1..110: mol_type = other DNA
taagaatgccagataccacaaataatccaccttaataatactacaatcctgcagatgtgactgatccctcatttgggtgctcagcttcccatgggaccttcctgcagtga

SEQ ID NO: 74247 - DNA, 110 bp, synthetic construct
  source 1..110: mol_type = other DNA
gacatcatgtcagccctgagcctgggggcccatgagctccacctcctttacacattcagatcatgccctcaactacatatggacagcatgccatgggcacaaacaggtcc

SEQ ID NO: 74248 - DNA, 110 bp, synthetic construct
  source 1..110: mol_type = other DNA
aaaccagcaggtaaaaccaagctgactccagagtttgtacacctaaccacattttctctatggaataaaagtaattatcatttccttccatggttcttgcatggcttaaa

SEQ ID NO: 74249 - DNA, 110 bp, synthetic construct
  source 1..110: mol_type = other DNA
atttttagggacacacctgcagcatatgcaggttccaagctagggtgagaaccagagctgcagctcctgaccagatccaaattcgggaccatcagcccactgatcaaggc

SEQ ID NO: 74250 - DNA, 110 bp, synthetic construct
  source 1..110: mol_type = other DNA
atgcaggttccaagctagggtgagaaccagagctgcagctcctgaccagatccaaattcgggaccatcagcccactgatcaaggccagagatcaaacctgcatcctcatg

SEQ ID NO: 74251 - DNA, 110 bp, synthetic construct
  source 1..110: mol_type = other DNA
ataaagaggaatttttaaaagatgagagcattctagatagaggggaaaacatatgggagggcaaaaggtgaggacagaaattattttggttaagttagacaggagttgac

SEQ ID NO: 74252 - DNA, 110 bp, synthetic construct
  source 1..110: mol_type = other DNA
caagaaaattctcttccacatttatgacttaaaaatctttcaaaaggtatattgcaagaagcacacattgagtacatgattcaaaaattgctttttagacataagatggc

SEQ ID NO: 74253 - DNA, 110 bp, synthetic construct
  source 1..110: mol_type = other DNA
tgtgtgtgcctaacatgagagcttcaaaatacacgaagtaaaatctgacagatttggaaggaaaaatacaattatagttggaaacttcaatattcttagtaatctacata

SEQ ID NO: 74254 - DNA, 110 bp, synthetic construct
  source 1..110: mol_type = other DNA
ctcagctcccctttcccccattactgagggcagacatgtgggtggactgacaggtgggtacaggtaagctacaccacagaatctttaccagatgcacatgccaacctcca

SEQ ID NO: 74255 - DNA, 110 bp, synthetic construct
  source 1..110: mol_type = other DNA
gggtacaggtaagctacaccacagaatctttaccagatgcacatgccaacctccatccccatctccacgaccgggagagaccttggcagtgaaatactaggacctctcta

SEQ ID NO: 74256 - DNA, 110 bp, synthetic construct
  source 1..110: mol_type = other DNA
cttggctgtggttggtttcttataaggtcaaggttagagggtcagtctggagtcagcatggggaaatcaaccacaggaagggtctagcaagtcaggctttgttgggggtc

SEQ ID NO: 74257 - DNA, 110 bp, synthetic construct
  source 1..110: mol_type = other DNA
gcatggggaaatcaaccacaggaagggtctagcaagtcaggctttgttgggggtcagctaatttctgacaaggtttagaggtcagtctggcagggatgagaggtcagtct

SEQ ID NO: 74258 - DNA, 110 bp, synthetic construct
  source 1..110: mol_type = other DNA
tccagctcttcatccatttatcctcgttacaggaataccagaggcaaagttcaaaccctgacattgctttcatgccaatcccggaggcagataagtccatttccctgcct

SEQ ID NO: 74259 - DNA, 110 bp, synthetic construct
  source 1..110: mol_type = other DNA
ccctgacattgctttcatgccaatcccggaggcagataagtccatttccctgcctaaggttgagctctttctggagggcattccagagttctcatctcaaagctgctgct

SEQ ID NO: 74260 - DNA, 110 bp, synthetic construct; identical to SEQ ID NO: 74258
  source 1..110: mol_type = other DNA

SEQ ID NO: 74261 - DNA, 110 bp, synthetic construct; identical to SEQ ID NO: 74259
  source 1..110: mol_type = other DNA

SEQ ID NO: 74262 - DNA, 110 bp, synthetic construct
  source 1..110: mol_type = other DNA
ggactttacattctatagcatatgtacaagagtgtgagctagtgctgggcagtgttccccctgagaatgttgtcgtgagatacattgttttaaacttattctttttttaa

SEQ ID NO: 74263 - DNA, 110 bp, synthetic construct
  source 1..110: mol_type = other DNA
cctgaactgggtccccagtcccagccagggtctcgctgcagcctggtctgaccaagacggagcttttgggaaaccaggagattagaaatttgtctaaagcgggtaaggca

SEQ ID NO: 74264 - DNA, 110 bp, synthetic construct
  source 1..110: mol_type = other DNA
ctcgccgccgcccctctggagtgagatggctggcaatctgtcttctctgggaccgagttccctcaggtgtgaggtgagagggctgactacatttgggttaaaaagctttt

SEQ ID NO: 74265 - DNA, 110 bp, synthetic construct
  source 1..110: mol_type = other DNA
gataagggtacaatatcaaaatacaaacgtaaataaccaagtataaatcacagtgggttgcagagcagaaacagactcacagactttgaaaaacttgtggttacgaaagg

SEQ ID NO: 74266 - DNA, 110 bp, synthetic construct
  source 1..110: mol_type = other DNA
tgggggaatgtttctaatctccagccatgatcagcaaactttatctcaggtcaaatccagcccgatacctgtttttgtaaattaagctttagtggaatacatccactttc

SEQ ID NO: 74267 - DNA, 110 bp, synthetic construct
  source 1..110: mol_type = other DNA
tccagcccgatacctgtttttgtaaattaagctttagtggaatacatccactttcatgtgtttatatctgtggctgcttgccacaatagaagagttgagagacagagact

SEQ ID NO: 74268 - DNA, 110 bp, synthetic construct; identical to SEQ ID NO: 74266
  source 1..110: mol_type = other DNA

SEQ ID NO: 74269 - DNA, 110 bp, synthetic construct; identical to SEQ ID NO: 74267
  source 1..110: mol_type = other DNA

SEQ ID NO: 74270 - DNA, 110 bp, synthetic construct
  source 1..110: mol_type = other DNA
taaggtctgagctgggcaaagcactagacaagacaagtagacccttccaatggtgatagtacgaggtcagtctggaatgaaagacgaaaaagactccatgaacgccatgc

SEQ ID NO: 74271 - DNA, 110 bp, synthetic construct
  source 1..110: mol_type = other DNA
tatcctctcaatagcataactggaaattggatggcttaaaaatgcaaatttcaaaacttttaccttttgatcaggagtctgcaaactacagcctctggccaaatccagca

SEQ ID NO: 74272 - DNA, 110 bp, synthetic construct
  source 1..110: mol_type = other DNA
acttttaccttttgatcaggagtctgcaaactacagcctctggccaaatccagcacgcctcctgtttttgtaaataatgtttcattgaaacacctccataccacccatac

SEQ ID NO: 74273 - DNA, 110 bp, synthetic construct
  source 1..110: mol_type = other DNA
agtaagtatctggcaggtagcaggttcttaatacatgtttgttcattcattctagcatcccagcttctcatgttaattatccttttctatactggctcacccaggtgtat

SEQ ID NO: 74274 - DNA, 110 bp, synthetic construct
  source 1..110: mol_type = other DNA
tgagccacgacagaaactccttcattggaccttttttccagttcatttttcaatagaagcttaacgtgtgcatatcttttatgttccatttaaagttcattgcacaagtg

SEQ ID NO: 74275 - DNA, 110 bp, synthetic construct
  source 1..110: mol_type = other DNA
ctgagtgaccatctcaggtccctcttctccagccttcaataacagtttccttactgttccaagcctttaggaactcctcaaggctccccagcttctgccctccagctctc

SEQ ID NO: 74276 - DNA, 110 bp, synthetic construct
  source 1..110: mol_type = other DNA
gttccaagcctttaggaactcctcaaggctccccagcttctgccctccagctctccccaagcaaaccacaggctttagggcttttgtgacatcactcctttatagcactg

SEQ ID NO: 74277 - DNA, 110 bp, synthetic construct
  source 1..110: mol_type = other DNA
gtgaatttcttcttactcttctgcagcaaaggtcacaaaaatgttagaattgatctttattcttcccttgtgctctacaaacttcagaatcaactaaatttcgcttttct

SEQ ID NO: 74278 - DNA, 110 bp, synthetic construct
  source 1..110: mol_type = other DNA
actctggtttctttctttaggagtactgaactgccatttaagaagtcagactagtctgagacaccatgccagaaaagcctcaaatacgtgctcagtttgacagtctcagc

SEQ ID NO: 74279 - DNA, 110 bp, synthetic construct
  source 1..110: mol_type = other DNA
ctgagacaccatgccagaaaagcctcaaatacgtgctcagtttgacagtctcagctagggcccagcatgccagccattcagacatgtaccagacatgtaaatgaaactgt

SEQ ID NO: 74280 - DNA, 110 bp, synthetic construct; identical to SEQ ID NO: 74278
  source 1..110: mol_type = other DNA

SEQ ID NO: 74281 - DNA, 110 bp, synthetic construct; identical to SEQ ID NO: 74279
  source 1..110: mol_type = other DNA

SEQ ID NO: 74282 - DNA, 110 bp, synthetic construct
  source 1..110: mol_type = other DNA
tggggtcactcatccaattgtgataatggaaaatgaaagtaaaacatgttacgtggacgtttgagaagacaagtacaaatcatatgcaagtattcttggcaactcaataa

SEQ ID NO: 74283 - DNA, 110 bp, synthetic construct
  source 1..110: mol_type = other DNA
gacgtttgagaagacaagtacaaatcatatgcaagtattcttggcaactcaataatactcaatattcctgtgactcaatccttttggcatttgattctcttgttactatt

SEQ ID NO: 74284 - DNA, 110 bp, synthetic construct
  source 1..110: mol_type = other DNA
catgctgacactaccctaagccccacccccaatgtgcctctatagctttgcctatgctgctgtcagcccttcctcctcctctccatgtgtctagagtctccttatcatcc

SEQ ID NO: 74285 - DNA, 110 bp, synthetic construct
  source 1..110: mol_type = other DNA
cctccttgcttgtgttcctactcagatttcctaggtcttgacacttttctttttctctaatctctgcttttaatttaatgcatttgtttaagttttgttggtggccagct

SEQ ID NO: 74286 - DNA, 110 bp, synthetic construct
  source 1..110: mol_type = other DNA
tctaatctctgcttttaatttaatgcatttgtttaagttttgttggtggccagcttcaaggagcatggaatttatgggctagtccctcgtggctgcggtctagacacagt

SEQ ID NO: 74287 - DNA, 110 bp, synthetic construct
  source 1..110: mol_type = other DNA
tttgagttactgctgcttctctgcttaacaagtattagtcatctacaccctttgtgtggtagtgtcgagtttttagctgtcttgtgtgtctgtgtgtgaggtgggtcagg

SEQ ID NO: 74288 - DNA, 110 bp, synthetic construct
  source 1..110: mol_type = other DNA
gtggtagtgtcgagtttttagctgtcttgtgtgtctgtgtgtgaggtgggtcaggggcttagggaagctctggggctgttcactgtatagcttcctaccttgatggctac

SEQ ID NO: 74289 - DNA, 110 bp, synthetic construct
  source 1..110: mol_type = other DNA
ttctggctttgctcagtgggttaaagtgttctggtggtgctgcaacctgtggcataggtctcggatgggactcagatctagtgtggctgtggcatagactagcagttatg

SEQ ID NO: 74290 - DNA, 110 bp, synthetic construct; identical to SEQ ID NO: 74289
  source 1..110: mol_type = other DNA

SEQ ID NO: 74291 - DNA, 110 bp, synthetic construct
  source 1..110: mol_type = other DNA
acctttgtaacccatgtgtttgatcattgagagcagaatcttttattttcttccgaataagctaaagaaacagtagttgttctctttttagttaattgagaagagtgctg

SEQ ID NO: 74292 - DNA, 110 bp, synthetic construct
  source 1..110: mol_type = other DNA
gtgaggccagggatcaaacctgcatccttgaagacacaatgtcagcttattaatcccctgagccataatgtgaactccagtatgtgacttttttaatgtttgtttttggt

SEQ ID NO: 74293 - DNA, 110 bp, synthetic construct
  source 1..110: mol_type = other DNA
aatcaaaccgggtaaatgggaagagccaatggcattgtaatgtcatgtgggaacagaatgcctgatttctgaatacatcacgatgaagttctttagctataagtgactct

SEQ ID NO: 74294 - DNA, 110 bp, synthetic construct
  source 1..110: mol_type = other DNA
gaatgcctgatttctgaatacatcacgatgaagttctttagctataagtgactctaatcttttatgccctttaatttgtttatctctggatatactttgagactccttcc

SEQ ID NO: 74295 - DNA, 110 bp, synthetic construct
  source 1..110: mol_type = other DNA
agttctagttctccagtccatgacatacagatcaagctactctacaaccatcagagtacaatttcaagagtgtaagtaggagagctctgtaggagaaagacatgatgttg

SEQ ID NO: 74296 - DNA, 110 bp, synthetic construct
  source 1..110: mol_type = other DNA
tagagagagatcttgaagcagaaaatcttgccctaaatttctaaaacaccccacttaaaagtgtatctgtcctctaaaattgctcctgccaactttcaacttcttatatg

SEQ ID NO: 74297 - DNA, 110 bp, synthetic construct
  source 1..110: mol_type = other DNA
agtattaaccaactttgtgttatctggctatattttgaaagattgagagctgtagccaagcccatttaaactttgcaatggggaatggttgccacttgtgaacattttct

SEQ ID NO: 74298 - DNA, 110 bp, synthetic construct
  source 1..110: mol_type = other DNA
aaccaatagacaattacagatgagtaggaattttcgacattactaagagcttcgtaaagagacttcaacctgagatgattgcctagcagttactggaacagtagctgaaa

SEQ ID NO: 74299 - DNA, 110 bp, synthetic construct
  source 1..110: mol_type = other DNA
ctcccgacacatgggaggagaatgggctaaatgttcctttccagttcctccctgtacctgtccacatgcctggcttcagagtacaagttcccacataacagctgggacca

SEQ ID NO: 74300 - DNA, 110 bp, synthetic construct
  source 1..110: mol_type = other DNA
acctgtccacatgcctggcttcagagtacaagttcccacataacagctgggaccaaccaagccattcacggttcctagaagcatctcacgcagtacatgcataacataaa

SEQ ID NO: 74301 - DNA, 110 bp, synthetic construct
  source 1..110: mol_type = other DNA
tgggtgagcggtgcatcagaagcctgtaggcaaattctgccctccttttgagtaggcttgaagagaaaaaattttagctccacagctattcctcctcaaaaagttaacac

SEQ ID NO: 74302 - DNA, 110 bp, synthetic construct
  source 1..110: mol_type = other DNA
aggctttgtttgggtgaatctttagtagtccttgctctagaacatggtctttgattctaagatgtggcctttctggtgttttagcttgatgtctgaggtgttcatttttc

SEQ ID NO: 74303 - DNA, 110 bp, synthetic construct
  source 1..110: mol_type = other DNA
tcaatccaaattataaccccaatcctcactgtcgtttttttcattttctttcttaaatataggaaatgatttttatagtctctttaggttcccttccagcttcttgtatc

SEQ ID NO: 74304 - DNA, 110 bp, synthetic construct
  source 1..110: mol_type = other DNA
aatataggaaatgatttttatagtctctttaggttcccttccagcttcttgtatcctctctttcccaattttccaaaacattatatctcaaggaaatatttgacttaaga

SEQ ID NO: 74305 - DNA, 110 bp, synthetic construct
  source 1..110: mol_type = other DNA
tcaggccacctgctcacagcaaaggatgcaatctctccacttattcatcatctcaccacattttcaactgtgtttcttggaatccatgagagtcaggagggagagtcaag

SEQ ID NO: 74306 - DNA, 110 bp, synthetic construct
  source 1..110: mol_type = other DNA
ccacattttcaactgtgtttcttggaatccatgagagtcaggagggagagtcaagaaactccttagtgaaagggtagagggctaaaaggggaagggatcccattacagct

SEQ ID NO: 74307 - DNA, 110 bp, synthetic construct
  source 1..110: mol_type = other DNA
gcgcgcctctcagctcccgagtgggcggcgaaccggcgatgcgccctcacctccctgctccgccgcagaaagcgagtcacgcttcctgtgtctattagtacccgcagcag

SEQ ID NO: 74308 - DNA, 110 bp, synthetic construct
  source 1..110: mol_type = other DNA
ggattgtgatttctgtgggcagaactcttcagttgtctgcctctaataatcccggttctcctggttttagagctgatgtaggaatatcatgtaggagtcaaactttaaat

SEQ ID NO: 74309 - DNA, 110 bp, synthetic construct
  source 1..110: mol_type = other DNA
ccattgcacatagcgggaactcctatcccttcctttttaaaaatgtctttgctgaaggattttaaagtaaatcttagacattgtatcatttcacttgtaaatacttaaaa

SEQ ID NO: 74310 - DNA, 110 bp, synthetic construct
  source 1..110: mol_type = other DNA
ttcctcatcccatcccgcgtttcttttagatatttcagactcgtggattttgaatgaagaatctagatagataatcacagtcagataatggttcagagatggtttcttgt

SEQ ID NO: 74311 - DNA, 110 bp, synthetic construct
  source 1..110: mol_type = other DNA
gaagaatctagatagataatcacagtcagataatggttcagagatggtttcttgttctcagaatctaaaacttcccaagggttaattttatgttcagggttttgtgagac

SEQ ID NO: 74312 - DNA, 110 bp, synthetic construct
  source 1..110: mol_type = other DNA
tttgatcattcaagaggttgaaactttgtcaggacaataccttagttggtgttcgataccagcaaagcagtggtatccactgtttcttctgattgatgaagaggaacgct

SEQ ID NO: 74313 - DNA, 110 bp, synthetic construct
  source 1..110: mol_type = other DNA
aggcttgctgccacccctctcaccagttccacatccttcctggtatcagagtcggagttagggcccctcttagctgctcctgagatgcccagcacttcctaccccagggc

SEQ ID NO: 74314 - DNA, 110 bp, synthetic construct
  source 1..110: mol_type = other DNA
tctttaactagagtactggatcttaatgtcatactatgaaacaaatctggaggcagtaagtggcagacctccactccactttctgaagtgcttccttggttcactggcat

SEQ ID NO: 74315 - DNA, 110 bp, synthetic construct
  source 1..110: mol_type = other DNA
gtaagtggcagacctccactccactttctgaagtgcttccttggttcactggcattgagctctagactcctattttattcttgatatttgaccccattcatctgtaatac

SEQ ID NO: 74316 - DNA, 110 bp, synthetic construct
  source 1..110: mol_type = other DNA
agaggaagaaggacagaaagaccacacctacagaaaaaatggataaaaagaatgatttattcacccacgtgaatattttgctcgtggaagtggatgaaataaagctcttg

SEQ ID NO: 74317 - DNA, 110 bp, synthetic construct; identical to SEQ ID NO: 74316
  source 1..110: mol_type = other DNA

SEQ ID NO: 74318 - DNA, 110 bp, synthetic construct
  source 1..110: mol_type = other DNA
atacagcaaaaacaataaagcaccttgtggttttatactcattccttccctaacttgtgtcagagaaattcccttatatacgcagactatgactgtccctctatatcagc

SEQ ID NO: 74319 - DNA, 110 bp, synthetic construct; identical to SEQ ID NO: 74318
  source 1..110: mol_type = other DNA

SEQ ID NO: 74320 - DNA, 110 bp, synthetic construct
  source 1..110: mol_type = other DNA
ttttagaatcaaacaaagtaagctcttcatttactaaaagtcttccttgcatatctaaggcacatgagtctctctcttcacttacacccctctctctcattatcatcata

SEQ ID NO: 74321 - DNA, 110 bp, synthetic construct; identical to SEQ ID NO: 74320
  source 1..110: mol_type = other DNA

SEQ ID NO: 74322 - DNA, 110 bp, synthetic construct
  source 1..110: mol_type = other DNA
tcttagaggcaaagcacagagtggtgtttgactagggcaaaaagtttgagactggtgggtctgaatcaagcaagataaatgaatggcattatgttacttcctgtctctgc

SEQ ID NO: 74323 - DNA, 110 bp, synthetic construct
  source 1..110: mol_type = other DNA
ctgagctcggggttgaatcagagctgcagctgtcagtctacattatagccactacaatgctggatctgagacctacactgcagctggtagcaacgccagacccttaactc

SEQ ID NO: 74324 - DNA, 110 bp, synthetic construct
  source 1..110: mol_type = other DNA
ttgcctcactcttcaaaataattaatatgtgcttcatattcagaattcaaaatgaagcatttctattctaacagtatggcagaagtttgtttacattggcctttagttag

SEQ ID NO: 74325 - DNA, 110 bp, synthetic construct
  source 1..110: mol_type = other DNA
attaaccactgtgccacgatgggaactcccctcatcatgtactatttaacagatagctttccttgctattcaggttaacttctctgagacttagctcatctatcattcct

SEQ ID NO: 74326 - DNA, 110 bp, synthetic construct
  source 1..110: mol_type = other DNA
attcttttcccacctccagattttagccagaactactgctctcaaaggtttgtgtcacagtaagctcagaaacactattaaagagtttcttgatcattataccctatata

SEQ ID NO: 74327 - DNA, 110 bp, synthetic construct
  source 1..110: mol_type = other DNA
gattatttcctggtgaatccgagcatcccaaatggacctagagatactgacatgagaagttcttcaatgaaaaggtccagcaagaacatcctatggtgcatcccagagat

SEQ ID NO: 74328 - DNA, 110 bp, synthetic construct
  source 1..110: mol_type = other DNA
tgctgtggtgcaggttcaatctctggcccaggaacttccacatgacatgggcatggccaaaaaagatgctactttggcatttgcacaaagaatgccacctgtcatatcag

SEQ ID NO: 74329 - DNA, 110 bp, synthetic construct; identical to SEQ ID NO: 74328
  source 1..110: mol_type = other DNA

SEQ ID NO: 74330 - DNA, 110 bp, synthetic construct
  source 1..110: mol_type = other DNA
actactcaaacgttcaagcctgtctgacacagaagaacccctccgtttcatgatacactttcttcatctggcttctaggtgacctcattctctcatggttctctcctatc

SEQ ID NO: 74331 - DNA, 110 bp, synthetic construct
  source 1..110: mol_type = other DNA
cactttcttcatctggcttctaggtgacctcattctctcatggttctctcctatcttgctggccgctgcgcttcatgaccctgtcaggggaaggccccagagctcaatct

SEQ ID NO: 74332 - DNA, 110 bp, synthetic construct
  source 1..110: mol_type = other DNA
taaaaaaataaataaaataaaataaatgggttcagaaagtacccaggttgatgaatgcactcacattctgggaggggaagtgaaccccaaactcctcaaagtcagaagct

SEQ ID NO: 74333 - DNA, 110 bp, synthetic construct
  source 1..110: mol_type = other DNA
tgcactcacattctgggaggggaagtgaaccccaaactcctcaaagtcagaagctcctttgctcaggacttttcaaaaccttgtactgtgtaccttttcatctgactgct

SEQ ID NO: 74334 - DNA, 110 bp, synthetic construct
  source 1..110: mol_type = other DNA
taattcattagaaaactgagcttggacagcctgccggctacctcagttgttaggtggtaaagccagaatttgaatccaaacttgatgggaagaggggaggagggacatgg

SEQ ID NO: 74335 - DNA, 110 bp, synthetic construct
  source 1..110: mol_type = other DNA
taatgtcctcttgttgcttcttcccacatctagagttatcctattatagtcattgatcttataaaactatatatttggttaactgcttcaagtcacctagacatcattat

SEQ ID NO: 74336 - DNA, 110 bp, synthetic construct
  source 1..110: mol_type = other DNA
agtaatagtccaagagagaaggattaatgtgataccactagctttcatttttactttcccattttatacatgttaaccaggatcatattttgtactgtcttgcactttga

SEQ ID NO: 74337 - DNA, 110 bp, synthetic construct
  source 1..110: mol_type = other DNA
tcagggaagaggagctcacccagtgctccttacaggtgagcagcacgtggggctcgagcttcctgatgaaagcaaaaccagaagcaaggacttggttccaagcccagata

SEQ ID NO: 74338 - DNA, 110 bp, synthetic construct
  source 1..110: mol_type = other DNA
gagcttcctgatgaaagcaaaaccagaagcaaggacttggttccaagcccagatagagccatttgtccctgaaagcaggatcttgattatcccacttaaccacctctctt

SEQ ID NO: 74339 - DNA, 110 bp, synthetic construct
  source 1..110: mol_type = other DNA
catgtggcactccaaccagagtaaggaggacttgatgtagcatgaggatcaaaggggagaacttggggatggcaggaaggagaaaatttgaagtagattcagggatagac

SEQ ID NO: 74340 - DNA, 110 bp, synthetic construct
  source 1..110: mol_type = other DNA
ggagaacttggggatggcaggaaggagaaaatttgaagtagattcagggatagactcagcagtgtcatggacatatgagaatggtatggatcttgtgccataaagtggac

SEQ ID NO: 74341 - DNA, 110 bp, synthetic construct
  source 1..110: mol_type = other DNA
ctttttctggttaaatcaccgtggcccctctccaaactctgtttacggtttaaagctgctccttagtcatgcagcagataatgtggcctctgctagaaggactgcaagga

SEQ ID NO: 74342 - DNA, 110 bp, synthetic construct
  source 1..110: mol_type = other DNA
ctgctccttagtcatgcagcagataatgtggcctctgctagaaggactgcaaggaggtgggggcaggtctcccctaaggcctcagaaatccaaccatggaggccagaggt

SEQ ID NO: 74343 - DNA, 110 bp, synthetic construct
  source 1..110: mol_type = other DNA
ttaaggatttggcattgccttgagctgcagtatatagctaggatcacatgtgacaatggctgaggctgtggcataggctacagctgaggctctgatttgacccctggcct

SEQ ID NO: 74344 - DNA, 110 bp, synthetic construct
  source 1..110: mol_type = other DNA
agggtcatggagagagtcagaggaggaactgggaagaaaacaagagcctttgaacccacaggtcaccgtatctagatacctgctctatttactcccacaatcctttgcaa

SEQ ID NO: 74345 - DNA, 110 bp, synthetic construct
  source 1..110: mol_type = other DNA
ccacaggtcaccgtatctagatacctgctctatttactcccacaatcctttgcaactgcactcacccacctgctgagactgaacagttatctgtggtcagcaggcagtga

SEQ ID NO: 74346 - DNA, 110 bp, synthetic construct
  source 1..110: mol_type = other DNA
gtcaggcattccacccgacttctaaaaattgagctcggagaacctctctgaccttcatcgccaacaagtcatcgagaggcccagattctgcccaaagccgacggctgcca

SEQ ID NO: 74347 - DNA, 110 bp, synthetic construct
  source 1..110: mol_type = other DNA
cacaggctgtggggccttcaattgtctctctcagagctactttgaaggtggaaggtataaaaccaaccagaaaagggtattcccccctccttctgaaccccctcaggcca

SEQ ID NO: 74348 - DNA, 110 bp, synthetic construct
  source 1..110: mol_type = other DNA
gtgcccattttaatacccttgatagactccttttgttcttaggagaaagtgaaaaaatcctttgaaatgacccttaggccctgcagacttgtccctgctccccactgctc

SEQ ID NO: 74349 - DNA, 110 bp, synthetic construct
  source 1..110: mol_type = other DNA
gaggacaccaagaaaaccaccgttaaggtatacaaagtgaaaactttagactcagaaaccattaaaaatgacaagaccttagagacagtgagtccagcatcaaggaaaaa

SEQ ID NO: 74350 - DNA, 110 bp, synthetic construct
  source 1..110: mol_type = other DNA
cctattaccagctggctaaccgagatgtcccaactggctttgtgaattggtaccgcggagtttcaacttttcaacatagaatgatgctattaatacatggccaccttctc

SEQ ID NO: 74351 - DNA, 110 bp, synthetic construct
  source 1..110: mol_type = other DNA
gagctctttccttcatactgaagtataacacaggaagggaactatgaggcagaaggggaacctctttgaacttcagatcggaggtggaaatccttgtggtgaccaggaca

SEQ ID NO: 74352 - DNA, 110 bp, synthetic construct
  source 1..110: mol_type = other DNA
caggaggggaaggggagggagagacagattatctacggcagctgagcatctgagtgtggaagccaaggtggtcacatatagaatttgtagtgttatgaaaaatcttaaca

SEQ ID NO: 74353 - DNA, 110 bp, synthetic construct
  source 1..110: mol_type = other DNA
atatttatttccgttaggaaatccttttaaagctttagcatcccacaaactatagtatttcctcatcctgagccattattacttagaaagaacatgccgggcaattttca

SEQ ID NO: 74354 - DNA, 110 bp, synthetic construct
  source 1..110: mol_type = other DNA
tatttcctcatcctgagccattattacttagaaagaacatgccgggcaattttcaacttgtggatttttcacttgacacccctcaccctctaaagtgtgatttataatcc

SEQ ID NO: 74355 - DNA, 110 bp, synthetic construct
  source 1..110: mol_type = other DNA
gcaacacaggatccaagccaagtctgcagcctacatcacagcaccacagccacagaaatgtgggatctatgccgcattttcgacctacaccacagttcaagcaactctag

SEQ ID NO: 74356 - DNA, 110 bp, synthetic construct; identical to SEQ ID NO: 74355
  source 1..110: mol_type = other DNA

SEQ ID NO: 74357 - DNA, 110 bp, synthetic construct
  source 1..110: mol_type = other DNA
aggcagccttaagtcaaaggttcaagagctccaggtgatggagagagaaagaagccaggtgaccggggcccttctactcactcgggtctctctctcccacctcccatcca

SEQ ID NO: 74358 - DNA, 110 bp, synthetic construct
  source 1..110: mol_type = other DNA
caggtgaccggggcccttctactcactcgggtctctctctcccacctcccatccatccacgctgaaccaaacttggtctctggttggccattttttaaaagcttctgatt

SEQ ID NO: 74359 - DNA, 110 bp, synthetic construct; identical to SEQ ID NO: 74357
  source 1..110: mol_type = other DNA

SEQ ID NO: 74360 - DNA, 110 bp, synthetic construct; identical to SEQ ID NO: 74358
  source 1..110: mol_type = other DNA

SEQ ID NO: 74361 - DNA, 110 bp, synthetic construct
  source 1..110: mol_type = other DNA
atgtaaagaggtagaggagatgatgcttagtaggatctatagctgcttgggaatttacacagtggtttgaagaacaggagaagagggggaacactggagcaggtgtgcaa

SEQ ID NO: 74362 - DNA, 110 bp, synthetic construct
  source 1..110: mol_type = other DNA
atgagacctaagtgctcattaaatgttagctgttattaggatctgggatccacgtacacactcacaaacactcgctcacttggagaggatatatcccaggatttcggtgt

SEQ ID NO: 74363 - DNA, 110 bp, synthetic construct
  source 1..110: mol_type = other DNA
ctccatcagtatgtcttacatatatttgctcatgagcttatacgtgaactgctgcgctcatcccatgatgaacatcataaagcgtctacgaacagtagaaattccagtag

SEQ ID NO: 74364 - DNA, 110 bp, synthetic construct
  source 1..110: mol_type = other DNA
acacacctggagaaaatgtctgggagaatacaaacaaacaatggttacctttgggtatcaagataggaaatttttcttttcacttcatggaattcggcacaatttacatt

SEQ ID NO: 74365 - DNA, 110 bp, synthetic construct
  source 1..110: mol_type = other DNA
agcagctcttctctcccattcttcgccttggttcccagttctctccccaaccttgtcctccccctgtttatttttatttttactttgtctttttagggccacacctgcag

SEQ ID NO: 74366 - DNA, 110 bp, synthetic construct; identical to SEQ ID NO: 74365
  source 1..110: mol_type = other DNA

SEQ ID NO: 74367 - DNA, 110 bp, synthetic construct
  source 1..110: mol_type = other DNA
caggctgcgcggcccaggagatggctccgcttcccacttctcgccctcagtttcctcatttgtccgacggactccgactaccgcaaatctctctaaagcgcggctgggca

SEQ ID NO: 74368 - DNA, 110 bp, synthetic construct
  source 1..110: mol_type = other DNA
tcatttgtccgacggactccgactaccgcaaatctctctaaagcgcggctgggcaccctcttgaatgccaagacaaagtggcagcagaaaggcatcccttgccctgcctc

SEQ ID NO: 74369 - DNA, 110 bp, synthetic construct
  source 1..110: mol_type = other DNA
tccttatctgtaaaatgaataggtcggcccactgttctcgggggcccctccacaccggtgaaaggccctaggacatgactctgtgccagtcacctgctcgcatcagcact

SEQ ID NO: 74370 - DNA, 110 bp, synthetic construct
  source 1..110: mol_type = other DNA
cttttttggtcccactgcatcaggccaggaattgaactcaagccatcacacagacaatgcctatcattaacccactgagctacaacaggaactcaaatttttaaatcaag

SEQ ID NO: 74371 - DNA, 110 bp, synthetic construct
  source 1..110: mol_type = other DNA
agttcctgggccatggattgaatctgagctgcagttgtgacctacactgcagcgatagcagtgttggatcctttaaccccaggccgggtatcaaacccatgcctctgcaa

SEQ ID NO: 74372 - DNA, 110 bp, synthetic construct
  source 1..110: mol_type = other DNA
gaggtagaatgccattttcatcacatcatgtcacagatgcctcctgtcagcataatttatcactgtggatgctgaatttgatcacctggttgagcttgtgttttagcagc

SEQ ID NO: 74373 - DNA, 110 bp, synthetic construct
  source 1..110: mol_type = other DNA
catattgacccttagtttttattcagatttaatggatgattatattcctcgttataaaaatagcagccagctatttgaaaactaagtcacatgctcttccctccttcaga

SEQ ID NO: 74374 - DNA, 110 bp, synthetic construct
  source 1..110: mol_type = other DNA
gtggttgtccgtggcatccttctgccctccttctggttggaatccctgttccccggagctgacttcctctccctgctcagtccactcccccgtcgggagcacatagcccg

SEQ ID NO: 74375 - DNA, 110 bp, synthetic construct
  source 1..110: mol_type = other DNA
agcccagagctctggttgactcagactcgtgcaggacctgagaggatgggcagcgggggcggcctggtcaggaagagaggagggtgcggaatggggagatcggggcggag

SEQ ID NO: 74376 - DNA, 110 bp, synthetic construct
  source 1..110: mol_type = other DNA
cctttccgtagtcaggaaccagagttataaaggggaaaggctcctggccagacaagcccggccagacctggaatctggcagatgagctaccggaagcccacagtggtgga

SEQ ID NO: 74377 - DNA, 110 bp, synthetic construct
  source 1..110: mol_type = other DNA
ggaggaaaacaataagaaatccaccctaatgaactttcctaccaagggaagagaaagcttccttaggttagaaaatatctaaacgatgcagtctctcaaaggatagacaa

SEQ ID NO: 74378 - DNA, 110 bp, synthetic construct
  source 1..110: mol_type = other DNA
agattttctcttttcaggacaatagtagttgaatggacactgactgcaaaaatgtacttcagatcttctttcataaaaatttctccaggctaacaaatctccatttcctt

SEQ ID NO: 74379 - DNA, 110 bp, synthetic construct
  source 1..110: mol_type = other DNA
acacagtaggtagccttttgtgtctttgcagcctcttaacagaataattttataattcatccatgtgcttgcatatatctttctctttcattgctgagtagtgttccagt

SEQ ID NO: 74380 - DNA, 110 bp, synthetic construct
  source 1..110: mol_type = other DNA
gggtccttctcaggaagatgcattaccggcctgagctgttgcccagggactctcgcagggtctcgagaggccgcctctggccctaaggccccaagcaatggtccagaaga

SEQ ID NO: 74381 - DNA, 110 bp, synthetic construct
  source 1..110: mol_type = other DNA
gtggcttctccccatccagcccagcttcggcctccactggacaggccctttgtgctgctgtgatgccatcactcacgtgcccgggagacagacctcaggatggcctgagc

SEQ ID NO: 74382 - DNA, 110 bp, synthetic construct
  source 1..110: mol_type = other DNA
tgctgtgatgccatcactcacgtgcccgggagacagacctcaggatggcctgagcttgtagcttctgacccaggctacctccccagcatctgttcccaactccccacttt

SEQ ID NO: 74383 - DNA, 110 bp, synthetic construct; identical to SEQ ID NO: 74381
  source 1..110: mol_type = other DNA

SEQ ID NO: 74384 - DNA, 110 bp, synthetic construct; identical to SEQ ID NO: 74382
  source 1..110: mol_type = other DNA

SEQ ID NO: 74385 - DNA, 110 bp, synthetic construct
  source 1..110: mol_type = other DNA
gctggacccttgacccaaaggcggtcaacattcagcccagcagatgctctacagggacaccccagaaacgaagagctctgcccaaaggggcagtgccaattagctaagcc

SEQ ID NO: 74386 - DNA, 110 bp, synthetic construct
  source 1..110: mol_type = other DNA
gacaccccagaaacgaagagctctgcccaaaggggcagtgccaattagctaagcccgctggactcccttcctttggaattctcaccagaaaacacacattatgcatcgat

SEQ ID NO: 74387 - DNA, 110 bp, synthetic construct
  source 1..110: mol_type = other DNA
ctctgggcttggatgggatgatgtatttgtctggaggagagatggactgtattgccagtgtgcctatttctgcataagaaataagggcctcgggtgggggcaggggcagt

SEQ ID NO: 74388 - DNA, 110 bp, synthetic construct
  source 1..110: mol_type = other DNA
cagtgtgcctatttctgcataagaaataagggcctcgggtgggggcaggggcagtggctttgccctgagccctggtaggtgtcaggtgaagccatcagtctcacacatcc

SEQ ID NO: 74389 - DNA, 110 bp, synthetic construct
  source 1..110: mol_type = other DNA
aacttgtccatagttttgggctatctttttaagaatgtttgtgtactgaaaaagcttggaagatgaggatagtgtttccgactagagaaacgggcaggcatgcttactgc

SEQ ID NO: 74390 - DNA, 110 bp, synthetic construct
  source 1..110: mol_type = other DNA
gaggctaaattactgatgcatgaaagaagtgtttcccaggagttcccgacgtggctcagtggttaatgaacctgactagtattcatgagcatgtggttccatccctgacc

SEQ ID NO: 74391 - DNA, 110 bp, synthetic construct; identical to SEQ ID NO: 74390
  source 1..110: mol_type = other DNA

SEQ ID NO: 74392 - DNA, 110 bp, synthetic construct
  source 1..110: mol_type = other DNA
gtgaaacgttgtgccccacctatccattccccatcatctactggcttatctatggagcacctactctgtatcacatcttccagctcggggattgaacctctgcaccttgc

SEQ ID NO: 74393 - DNA, 110 bp, synthetic construct
  source 1..110: mol_type = other DNA
agcacctactctgtatcacatcttccagctcggggattgaacctctgcaccttgccttcccctgcccaaaagcatctaggttactggacaggtatgtatggaagaggaag

SEQ ID NO: 74394 - DNA, 110 bp, synthetic construct
  source 1..110: mol_type = other DNA
aatgaggagccagtaagtcttagtctttggttataaggaactattgttctgccacgttaactctctcagtatctcaagtattgtatttctcccttcatagctattttcat

SEQ ID NO: 74395 - DNA, 110 bp, synthetic construct
  source 1..110: mol_type = other DNA
atccaggaactaacttggaaggaaaaggttatggcagaaccatacggaaatgccaaagtcattctggggatatgaccaagcatctatgcatggaggataggacaccaacg

SEQ ID NO: 74396 - DNA, 110 bp, synthetic construct
  source 1..110: mol_type = other DNA
aagtcattctggggatatgaccaagcatctatgcatggaggataggacaccaacgcaaaaggtaggcatgtgtttaccatctatataaaccaacctagttccaatatttc

SEQ ID NO: 74397 - DNA, 110 bp, synthetic construct
  source 1..110: mol_type = other DNA
aacccactcagcatcagaaccagagcagttaaagatgggggactcccaagttttcccctctccacttctcagccatggcccttccagctaaactgcctctcagttatatg

SEQ ID NO: 74398 - DNA, 110 bp, synthetic construct
  source 1..110: mol_type = other DNA
cagcattacatgaaagaagagctgaaggtagaaagggcaatggctttgtggggcacactcactgatctgttccataaacaatactgaacattactgaagaggaatctgcc

SEQ ID NO: 74399 - DNA, 110 bp, synthetic construct
  source 1..110: mol_type = other DNA
tataaacaccttctgcagctcatcttttcttctccattccactgtctagctcaggcatcagtgtctcttaacaaacttcctgcataagcttcctaaactaattcctcaga

SEQ ID NO: 74400 - DNA, 110 bp, synthetic construct
  source 1..110: mol_type = other DNA
catcagtgtctcttaacaaacttcctgcataagcttcctaaactaattcctcagacttttgctttcaaatccatcctccacaacatagccagagtgagtgacctatcaaa

SEQ ID NO: 74401 - DNA, 110 bp, synthetic construct
  source 1..110: mol_type = other DNA
agttgtttgttacatcttgatacatctcataaatcacaaattgtaaccacaaaagctgacttcgccctcaggagctcagatccccctcagtccttagtccctccttgtgg

SEQ ID NO: 74402 - DNA, 110 bp, synthetic construct
  source 1..110: mol_type = other DNA
tgctgagaaattctgagaaaattttttttccacaactggccagaacagtcacccactgggtgtgaagttgcagcattttaagggctctagagagactggcaccaggagga

SEQ ID NO: 74403 - DNA, 110 bp, synthetic construct
  source 1..110: mol_type = other DNA
ctgggtgtgaagttgcagcattttaagggctctagagagactggcaccaggaggaaagaaccgggcaacagccaggctctcctattctccaggaaaccaaaaggaacttc

SEQ ID NO: 74404 - DNA, 110 bp, synthetic construct
  source 1..110: mol_type = other DNA
gactctggagtgggtgaagcaagccttcagagagaggctgggaggactggagattccggcagtgtccatccaggctggcagatcccagcagtgttcccttgggggacact

SEQ ID NO: 74405 - DNA, 110 bp, synthetic construct
  source 1..110: mol_type = other DNA
agaatggctcaggccccgcctggcttctcttccatcaaggaagtgaggcctggggcgttcccctggtggcgcagcacattgacggtttggcgttgtcactgcaggggccc

SEQ ID NO: 74406 - DNA, 110 bp, synthetic construct
  source 1..110: mol_type = other DNA
cgttcccctggtggcgcagcacattgacggtttggcgttgtcactgcaggggccccagtcactgctgtggcatgggtttggactctggccctggaacttctgcataccat

SEQ ID NO: 74407 - DNA, 110 bp, synthetic construct
  source 1..110: mol_type = other DNA
cagccgtggtcagcagcttcctaagcttagttctctccgatctgtcatctctggctgaaaatctgcaaaccttctgagtaaaatttctagcattcaccattttcgatttc

SEQ ID NO: 74408 - DNA, 110 bp, synthetic construct
  source 1..110: mol_type = other DNA
atccttcttgtctcactgcattcccagtcccttgttgagtggagagctaagcctggagtttttcccagactccatagaatcatgtctgtcctgaagcccatctgcgcctc

SEQ ID NO: 74409 - DNA, 110 bp, synthetic construct
  source 1..110: mol_type = other DNA
taaagccacacacgggtgaaaatcctgcttcccccttgaccttctgtgataccacacttggagttggggacatgtcactgggggggttggggctccatgttaaggagaaa

SEQ ID NO: 74410 - DNA, 110 bp, synthetic construct
  source 1..110: mol_type = other DNA
acttggagttggggacatgtcactgggggggttggggctccatgttaaggagaaagtgaaagtctcagcagcccccactcagcctctgccggtggggggagggtgtagtc

SEQ ID NO: 74411 - DNA, 110 bp, synthetic construct
  source 1..110: mol_type = other DNA
tgcaaccactgatataaggcaccttaatttgcatcctgtcttcccaaatgtgcatattccaagggtgttgagagctgaagacatcagttcaatgcagtgttccttctgtg

SEQ ID NO: 74412 - DNA, 110 bp, synthetic construct
  source 1..110: mol_type = other DNA
attccaagggtgttgagagctgaagacatcagttcaatgcagtgttccttctgtgaaactcagcagcggctaaggaccctccccctttttctgttataattatcagacta

SEQ ID NO: 74413 - DNA, 110 bp, synthetic construct
  source 1..110: mol_type = other DNA
ctttacagactaacccctcaaggctcatatttggctccatccaagcttggccgtgtccacctagatggccactgaccaacttcctgtctgacttctatttgtactcaaag

SEQ ID NO: 74414 - DNA, 110 bp, synthetic construct
  source 1..110: mol_type = other DNA
aataatttatgacattcctgtgggcagggaggtagggggatccatgtgtgcctatgtcgataaacagattcttagatgatatgcccttttttgagtggttaagccaggga

SEQ ID NO: 74415 - DNA, 110 bp, synthetic construct
  source 1..110: mol_type = other DNA
tctatttttgcttttttagggctgcacccatggcaggttctcaggctaggggtggaattggaggaattggagctgtagcttctggcctaacatcacagccacagcaatgc

SEQ ID NO: 74416 - DNA, 110 bp, synthetic construct
  source 1..110: mol_type = other DNA
ttagggctgcacccatggcaggttctcaggctaggggtggaattggaggaattggagctgtagcttctggcctaacatcacagccacagcaatgcaggatctgagccatg

SEQ ID NO: 74417 - DNA, 110 bp, synthetic construct
  source 1..110: mol_type = other DNA
aatcagagccctcccccgtccctcctgcctgcacagtccttctcattgacaatattctggaagacacaatacaaggacatttccccccagtaaaactgcttgtgagtttg

SEQ ID NO: 74418 - DNA, 110 bp, synthetic construct
  source 1..110: mol_type = other DNA
tctggaagacacaatacaaggacatttccccccagtaaaactgcttgtgagtttgtgttaaaaaaagccaaccttcttaaactaggattgcatctcaccgccctccagcg

SEQ ID NO: 74419 - DNA, 110 bp, synthetic construct
  source 1..110: mol_type = other DNA
gaggaacagcagaagcacttcatctccacaaacagcttgctaggcggtgctcatggaaaactccattctctggtggctttttcaaaggatgtgctctgcttcaaagtaag

SEQ ID NO: 74420 - DNA, 110 bp, synthetic construct
  source 1..110: mol_type = other DNA
ctcattgtaggaaatagtaccaaagatgttagatggcgatatctataatccaatcattagtcgtcagccacaggctgcacacacagcccctcagtggagctcccaggggg

SEQ ID NO: 74421 - DNA, 110 bp, synthetic construct
  source 1..110: mol_type = other DNA
acctctgctagtggctggctctcagctacctacatagctatttttaaactatgtttggaacataaacaaattatgattgtggccagggtttggggctctgttgcccacta

SEQ ID NO: 74422 - DNA, 110 bp, synthetic construct
  source 1..110: mol_type = other DNA
acgtgtgaccctggtccatactcatgcaattgcaaaccctaaatatggggcttgtagcacccctagggccacccttgactgagaatgattaataaatgattcatcactcg

SEQ ID NO: 74423 - DNA, 110 bp, synthetic construct
  source 1..110: mol_type = other DNA
atctgtcacagaaactggagagagatgctgaagtaagctgctatgttagagggctacttggttaggataggaagtagcctctaaaagctgaaagcaactcctgaccaaga

SEQ ID NO: 74424 - DNA, 110 bp, synthetic construct
  source 1..110: mol_type = other DNA
accccatagagtattttttaaattaagctatacgtgcattgattttcaacacacattgctattgtacatgatagactgcagtatcatgtaaacataactcttatatgcac

SEQ ID NO: 74425 - DNA, 110 bp, synthetic construct
  source 1..110: mol_type = other DNA
acccttaaactgtctttcctccctcacaattccaaagctcctaacacatgtccttatgtttgatgccattacggttaagaattagtctaacttaagtctaccttctctaa

SEQ ID NO: 74426 - DNA, 110 bp, synthetic construct
  source 1..110: mol_type = other DNA
atgtttgatgccattacggttaagaattagtctaacttaagtctaccttctctaagaatcttctgctaaaaatatcatagattaggacttcctaagaatgtaggtttagg

SEQ ID NO: 74427 - DNA, 110 bp, synthetic construct
  source 1..110: mol_type = other DNA
gccataaattcagaagtggacttgcagtgtcctggtgggcagtggtcataagactcctgcacctgtgtgagaagctggcatttaaagggcaatctttaaaggtctctaaa

SEQ ID NO: 74428 - DNA, 110 bp, synthetic construct
  source 1..110: mol_type = other DNA
gaccagaagaactcacatctttggttcttaagaagagttttgtggactccaccagcaggctcacttcagccttccgcccctcgtggtagggcggtgtgtgccagcgatgg

SEQ ID NO: 74429 - DNA, 110 bp, synthetic construct
  source 1..110: mol_type = other DNA
caggctcacttcagccttccgcccctcgtggtagggcggtgtgtgccagcgatggtgtatatatatagtttgtttggaactagtaatttgacattttgttaagaatcggt

SEQ ID NO: 74430 - DNA, 110 bp, synthetic construct
  source 1..110: mol_type = other DNA
ctcagagccacctcgacacagctcttacctctgttctccactttttgtctgaacccaggctttcaaaacatgtttggtaggagttcccattgtggtcagggggttgaaga

SEQ ID NO: 74431 - DNA, 110 bp, synthetic construct
  source 1..110: mol_type = other DNA
ttgaggtggcacgtcatcaagtcccccccactgagtgccacgcagccccagctgggaccggcatactgacctttggttctaactctgcctcgaaccagttgtgcaccgga

SEQ ID NO: 74432 - DNA, 110 bp, synthetic construct
  source 1..110: mol_type = other DNA
aagttatctgtggaggcacgtaaagaaatgactgtgaaagctattaagacagttcaacattttattgagaagccaaggaaaagaagttccgaagaagacattcaggaagc

SEQ ID NO: 74433 - DNA, 110 bp, synthetic construct
  source 1..110: mol_type = other DNA
tcccagtaaattccttgctccacatcctcgtctcaggctctgctttaagatgctcctgttcctgcattccatcgcccttctcccacatctcactctcaatgaagataact

SEQ ID NO: 74434 - DNA, 110 bp, synthetic construct
  source 1..110: mol_type = other DNA
ctgttcctgcattccatcgcccttctcccacatctcactctcaatgaagataacttccgctggtttccactgtgatgggatggtggtaaatggataacaggcgggtcata

SEQ ID NO: 74435 - DNA, 110 bp, synthetic construct
  source 1..110: mol_type = other DNA
cccatgacagaaggagacatggggtcgtgtggaccagagactgagcagcacacctctggtccccccagccctctttttgcccaaataacccccttttttaaagctgagta

SEQ ID NO: 74436 - DNA, 110 bp, synthetic construct
  source 1..110: mol_type = other DNA
ctggtccccccagccctctttttgcccaaataacccccttttttaaagctgagtatgagatctcagtcaggggagttttcctgtggtgcagtgggttaaggatctggcat

SEQ ID NO: 74437 - DNA, 110 bp, synthetic construct
  source 1..110: mol_type = other DNA
tcttcactctaaaatgtctgtggggctccgtgttcttccagacagacaacagggaggaacttcttcccagacaagcctagttagcagtgtatatttagaaaccaaagaca

SEQ ID NO: 74438 - DNA, 110 bp, synthetic construct
  source 1..110: mol_type = other DNA
ttgttggcagttgtctctaattgatgctctattaacaatcaagggagaatttcctttccatgtgggaagagaagctgccagcgaataggaaaacaacatgcaggctgatg

SEQ ID NO: 74439 - DNA, 110 bp, synthetic construct
  source 1..110: mol_type = other DNA
ttccatgtgggaagagaagctgccagcgaataggaaaacaacatgcaggctgatggtgtctgatttcttagcccagagggttatggagtcagggaaaggccagtgggcag

SEQ ID NO: 74440 - DNA, 110 bp, synthetic construct
  source 1..110: mol_type = other DNA
accagttgactaacattcttggtatgtccagataattcaagagaaaactttaatgctgagtccaatttattacctctgctgcattctttcctactagccatgtcccaccg

SEQ ID NO: 74441 - DNA, 110 bp, synthetic construct
  source 1..110: mol_type = other DNA
ctgagtccaatttattacctctgctgcattctttcctactagccatgtcccaccggcatcttgggacagcttagaaatcactactattactgtcactgctactactacta

SEQ ID NO: 74442 - DNA, 110 bp, synthetic construct
  source 1..110: mol_type = other DNA
gcctctatcactgatttatggtgatgattcagtaaaggtgaaaacacttgcaaggggtctagccccatagtaggtgcccaatgaactttggtgaagctactgctggttac

SEQ ID NO: 74443 - DNA, 110 bp, synthetic construct
  source 1..110: mol_type = other DNA
ggtctagccccatagtaggtgcccaatgaactttggtgaagctactgctggttacagacataatgggtcagtgtctggctggcaacggctcaggaagttgggtaaatcat

SEQ ID NO: 74444 - DNA, 110 bp, synthetic construct
  source 1..110: mol_type = other DNA
atgcaggagatcaatgtccttccctgtggcacaagctggggtgtcatggaggcggatgctgccaggacagtagtcagtggctacagagggagaagcatggagactggccc

SEQ ID NO: 74445 - DNA, 110 bp, synthetic construct
  source 1..110: mol_type = other DNA
gatatgacatctgactccagggacagaacctgggctctttggtaaaaccacagatagctaacacttggccaaacactcattgatgtactgaaagactagtgtgcaaacag

SEQ ID NO: 74446 - DNA, 110 bp, synthetic construct
  source 1..110: mol_type = other DNA
agctaacacttggccaaacactcattgatgtactgaaagactagtgtgcaaacagatgccaatttgggcccataatcacagatgtcctttcccaagtaagaagatggctg

SEQ ID NO: 74447 - DNA, 110 bp, synthetic construct
  source 1..110: mol_type = other DNA
gcacttatgaatctattacacacaaggggataactgggagcttctgcgtgtaaggtgtgctgggaaatgagttctctgataccctgcaagtgagagggtttttcaagcga

SEQ ID NO: 74448 - DNA, 110 bp, synthetic construct
  source 1..110: mol_type = other DNA
tgtgctgggaaatgagttctctgataccctgcaagtgagagggtttttcaagcgactgttacttcccccctctgagctccagtacacacaaggcccaacacagggctatg

SEQ ID NO: 74449 - DNA, 110 bp, synthetic construct
  source 1..110: mol_type = other DNA
ttcagctttcgtgtagcataatgttttcaaggtatattgaccatttacattatgatttaagctcttaacttggtttaactcattaactccttataaccctgtaagttagt

SEQ ID NO: 74450 - DNA, 110 bp, synthetic construct
  source 1..110: mol_type = other DNA
gatactggaaaaatcagttcatatctgtgaaagcacttagaacgtggcctgctcctccataagcattgcagggtgttagctattattattccacttctcagacaccaggc

SEQ ID NO: 74451 - DNA, 110 bp, synthetic construct
  source 1..110: mol_type = other DNA
aggatggagcactccctctgcttccgcttccttgtgcagaccctggctcataaaatcatacacgaataaaacagatgtatacgaggagctctgatttgggaaatcagaat

SEQ ID NO: 74452 - DNA, 110 bp, synthetic construct
  source 1..110: mol_type = other DNA
tcatacacgaataaaacagatgtatacgaggagctctgatttgggaaatcagaatggcaaggctgcatgacgaaaattctttgtctgctgtctcctctggaagttgctct

SEQ ID NO: 74453 - DNA, 110 bp, synthetic construct
  source 1..110: mol_type = other DNA
ttggaaaaatccatgcaagcatgaattttctatcacatttgcctacaatgggaatcatttatatcctgttttactttgcttcatttgagttaattgctcttgaaatattc

SEQ ID NO: 74454 - DNA, 110 bp, synthetic construct
  source 1..110: mol_type = other DNA
tattactatccctctgctccaccacatctttggacacttctccttttcacagcctccgagtcatcttggtctgtctcctctaggcctgtcaggtgatcacaaaatgtgag

SEQ ID NO: 74455 - DNA, 110 bp, synthetic construct
  source 1..110: mol_type = other DNA
ccgagtcatcttggtctgtctcctctaggcctgtcaggtgatcacaaaatgtgagtaacatggtgccctcaggaatccttcaaaaagacaaaatctgcccaactcattga

SEQ ID NO: 74456 - DNA, 110 bp, synthetic construct
  source 1..110: mol_type = other DNA
tttcatatattttatctgtaatttatgtcagatgctagtctttctgacacctcaccacttgaaaatcctctctcttgctgtctttctcagggcattcactttctcaccac

SEQ ID NO: 74457 - DNA, 110 bp, synthetic construct
  source 1..110: mol_type = other DNA
gggagaatccctgattcatcatgatgccaacaggtagagctctaacctggccgggcaccagagaaaaacaggattcgggttccggtctactacgaaatccacgaatggta

SEQ ID NO: 74458 - DNA, 110 bp, synthetic construct
  source 1..110: mol_type = other DNA
aaataattaagagtcttgcatctcgatccaatcaatctcaagggaacagttttgaaagttccctgagacaatgaccagtagaacagtgtttaaaaatgagacatttgtca

SEQ ID NO: 74459 - DNA, 110 bp, synthetic construct
  source 1..110: mol_type = other DNA
taatagaaaagtgattcaaatatatagttgctggcacactgaaaactaatacataggaagaagacaatactgcattttaacctagcaagtcattagaatttctaaaacag

SEQ ID NO: 74460 - DNA, 110 bp, synthetic construct
  source 1..110: mol_type = other DNA
agtctatgtcaagtgttaaaaatgagacgcataaatacctacgtttcatcctttttggtaattcgagagtggacattttggtgttgtattctgagccataaaattttcag

SEQ ID NO: 74461 - DNA, 110 bp, synthetic construct; identical to SEQ ID NO: 74460
  source 1..110: mol_type = other DNA

SEQ ID NO: 74462 - DNA, 110 bp, synthetic construct
  source 1..110: mol_type = other DNA
ctaatctgaaaaatggcacaatgtttctgaaacttcatctgctattctgtccctttttacttttctatagaattttcagtccttatcttatacgatctatgaaaaatgcc

SEQ ID NO: 74463 - DNA, 110 bp, synthetic construct
  source 1..110: mol_type = other DNA
gtttaagtcacctttgcaaaatgttgggagttagctaagattacaaacgttcaattcagaccccagttgctagagaaaaaaacacatgtttatatggcagctgggggcaa

SEQ ID NO: 74464 - DNA, 110 bp, synthetic construct
  source 1..110: mol_type = other DNA
gacctctctaccctggaaggttcccagtccagtgagttaacaaccctaacaaaggatcctcaaggctgggccaagggaagtaagaagttttcctgggaaaggctctccac

SEQ ID NO: 74465 - DNA, 110 bp, synthetic construct
  source 1..110: mol_type = other DNA
tgcatcctttaatccactgtgccagctggggctagacccttcacttctgcagttacctgagctgctgctcccagattcttaacccactgtgccaaggtgagaactccctg

SEQ ID NO: 74466 - DNA, 110 bp, synthetic construct
  source 1..110: mol_type = other DNA
attgatcttggagtgtctttgttccatctgactttcatatttcaaaccgggttttcaaggctggagccgatggaaagaatatgaatttttcaaccctctgaaggaatgat

SEQ ID NO: 74467 - DNA, 110 bp, synthetic construct
  source 1..110: mol_type = other DNA
caaggctggagccgatggaaagaatatgaatttttcaaccctctgaaggaatgatttctaaccccacctctgccatttaaaagctgtgtggccttgaataagtcacttag

SEQ ID NO: 74468 - DNA, 110 bp, synthetic construct
  source 1..110: mol_type = other DNA
tatttgaaaatatggataagatctcacaggaaaataattcagagaacagagtgatgaaatctaacacagccttgaagaacaccgaagcacgttcatgcagagggctacac

SEQ ID NO: 74469 - DNA, 110 bp, synthetic construct
  source 1..110: mol_type = other DNA
cctggtctctcctttctctcccagtctgaagtctgtattagtcggtggtctttagagaaacagaactcctaggatagagagaagtagagatagagacacagtccagacag

SEQ ID NO: 74470 - DNA, 110 bp, synthetic construct
  source 1..110: mol_type = other DNA
tattagtcggtggtctttagagaaacagaactcctaggatagagagaagtagagatagagacacagtccagacagacacttagatataaagacacagatatagacttaga

SEQ ID NO: 74471 - DNA, 110 bp, synthetic construct
  source 1..110: mol_type = other DNA
ttcttgcaaaccctctaagaaaaaaagtggaagcagaagggaacctgcacactgtcagccacgggatcccagcttccagctcaggcggctctcagcccttgagtctggtc

SEQ ID NO: 74472 - DNA, 110 bp, synthetic construct
  source 1..110: mol_type = other DNA
cagccacgggatcccagcttccagctcaggcggctctcagcccttgagtctggtctggagcctctcaacaggggtgcctgactttctggaggtggggagggaagtgggag

SEQ ID NO: 74473 - DNA, 110 bp, synthetic construct
  source 1..110: mol_type = other DNA
acccgtatctgcagctcggttccgaaatcatccgtggccatctgcacgtgttctgcgtttcatccggatctggactttctgttctaagttgagtttacaggtcctcgtta

SEQ ID NO: 74474 - DNA, 110 bp, synthetic construct
  source 1..110: mol_type = other DNA
cgtttcatccggatctggactttctgttctaagttgagtttacaggtcctcgttattctatttttatttagatttcactatttgattacacctgcttcctgtaacggacc

SEQ ID NO: 74475 - DNA, 110 bp, synthetic construct
  source 1..110: mol_type = other DNA
ttacagcaccaagcacgcagtaaagggtagggaccatggttaccacagctgttgctgctcctgctacttctaatgtaggactcttactctgttcctgccatcttggctaa

SEQ ID NO: 74476 - DNA, 110 bp, synthetic construct
  source 1..110: mol_type = other DNA
gccaagtcctaacccctagaccaccagggaactccctgttttttatacagtttttaataactttccatttactgttaatacaaagtactggccatattctctgtatggaa

SEQ ID NO: 74477 - DNA, 110 bp, synthetic construct
  source 1..110: mol_type = other DNA
aataactttccatttactgttaatacaaagtactggccatattctctgtatggaacagtatatccttgagcctatcttagacccaatattttgtgcctccccctccccta

SEQ ID NO: 74478 - DNA, 110 bp, synthetic construct
  source 1..110: mol_type = other DNA
ttctctcgcctcccctttgtaacactgtatatgtgaacattccttggagctcaaccagcaactccgagcctgctcctaggccatggggcgtgttggcaggaataaaagtt

SEQ ID NO: 74479 - DNA, 110 bp, synthetic construct
  source 1..110: mol_type = other DNA
cctgaaaggtcggctgggtgcttactctcatcttttgctgtgaatagatcagaggatttcctaccatcaagatctttcagaagggcgagtcccccgtggattacgacggg

SEQ ID NO: 74480 - DNA, 110 bp, synthetic construct
  source 1..110: mol_type = other DNA
atttcctaccatcaagatctttcagaagggcgagtcccccgtggattacgacggggggcggacgcggtccgacatcgttacccgggctcttgatctgttttcggataacg

SEQ ID NO: 74481 - DNA, 110 bp, synthetic construct
  source 1..110: mol_type = other DNA
gttcccaggccagggatcgaatctgagccgcagcatcgacctgcaccacagctgtgacaacgccagatcttttaacccactgtgcgaggccagggatcgaacctgcagct

SEQ ID NO: 74482 - DNA, 110 bp, synthetic construct
  source 1..110: mol_type = other DNA
tcgacctgcaccacagctgtgacaacgccagatcttttaacccactgtgcgaggccagggatcgaacctgcagctcttcagccacccaagccattgcagttggattctta

SEQ ID NO: 74483 - DNA, 110 bp, synthetic construct
  source 1..110: mol_type = other DNA
agttggccggcagaaacagccctgtttgaaactgtttttgctcatcagttaccatccccagatggcattcgacagtcttcgaccgtttctatggtcttatagctccgggt

SEQ ID NO: 74484 - DNA, 110 bp, synthetic construct
  source 1..110: mol_type = other DNA
ccccagatggcattcgacagtcttcgaccgtttctatggtcttatagctccgggtattcatcccccgaggctgcttcatgaggccaggggctggtgaatgacacttactt

SEQ ID NO: 74485 - DNA, 110 bp, synthetic construct
  source 1..110: mol_type = other DNA
gtgagagtttctgcctgatattctgggtgtctcctggagccagaccacagagcagtctggacacttttaatgtggccgagccacgggcagggggctcctagtgacagcat

SEQ ID NO: 74486 - DNA, 110 bp, synthetic construct
  source 1..110: mol_type = other DNA
tctggacacttttaatgtggccgagccacgggcagggggctcctagtgacagcatctggcttgggagatggtgtttgactgtcctctaagttggttctcaagctccacgt

SEQ ID NO: 74487 - DNA, 110 bp, synthetic construct
  source 1..110: mol_type = other DNA
ccctctgaagatatggttctgtttcttctatcttctgtcttttctgttgagaagtcagctaccagtgttagatcaactataggctaaataacaagaaaattcccagctgt

SEQ ID NO: 74488 - DNA, 110 bp, synthetic construct
  source 1..110: mol_type = other DNA
aaggagctcatagtcacaccacacacagctcagcgcacatagcggcaagaggctacggcataccggaagagctttcgttgaaaactctttaggcaaatacagagtgaatg

SEQ ID NO: 74489 - DNA, 110 bp, synthetic construct
  source 1..110: mol_type = other DNA
atttccttgtttatgttcctgacggacagggcccaggctggaattccagttccactgtgtcccaaatgtgtggctctaagcacaccatggaacctttcccactgagtcta

SEQ ID NO: 74490 - DNA, 110 bp, synthetic construct
  source 1..110: mol_type = other DNA
tgttagattttatgaataggaggcagacggagagatggaaagggagaggacggggtggggccttcctgtgggttttccccagcagtagctttgcacctccgaggtagtga

SEQ ID NO: 74491 - DNA, 110 bp, synthetic construct
  source 1..110: mol_type = other DNA
ttctggaagtcagctgaaggcactgctgttggagagctgttgcaaagggctcaagtgtgggctcagtgctgaaaagtgtatttgcaaggtgtttactggctgcctgttcc

SEQ ID NO: 74492 - DNA, 110 bp, synthetic construct
  source 1..110: mol_type = other DNA
agtaaaattctggcattcatagtgatgaagctgaaagtagtttcaatttagtgaatataatgtgtgtgagagtgagaaattttttaacaatagatcatggatcagactta

SEQ ID NO: 74493 - DNA, 110 bp, synthetic construct
  source 1..110: mol_type = other DNA
gaaaagaactacaatataatctagcttcctgcaacaaatcatctacaaaatttacaacaaaattggtaaatggtgtcctagatgtgccaaaaaggaggaaaattatgttt

SEQ ID NO: 74494 - DNA, 110 bp, synthetic construct; identical to SEQ ID NO: 74493
  source 1..110: mol_type = other DNA

SEQ ID NO: 74495 - DNA, 110 bp, synthetic construct
  source 1..110: mol_type = other DNA
agcaagacaggctgcagctggtgacacctgtggccgatggcgggagtgactcagtcaggaatgtggcctcatctggcgctgggcccctgcctctaactaactgaaccaga

SEQ ID NO: 74496 - DNA, 110 bp, synthetic construct
  source 1..110: mol_type = other DNA
cctttgctgtcacctgctgtgctgtcctcatcacactcccctcatggcaccttggtctatagccttgtcgaaattctctattccctcaaaaggttataattttcatggaa

SEQ ID NO: 74497 - DNA, 110 bp, synthetic construct
  source 1..110: mol_type = other DNA
cacactatcccgtagcacaagacatggatgggttcttgcgtttaagtctggtcttgcccttcaaataaccagctccttggaggacttacctttgtcttctgactgcctgc

SEQ ID NO: 74498 - DNA, 110 bp, synthetic construct
  source 1..110: mol_type = other DNA
gcccttcaaataaccagctccttggaggacttacctttgtcttctgactgcctgcagtgctggaggtggttctgccgtcaaacactcagtcagacactttcaggtgctga

SEQ ID NO: 74499 - DNA, 110 bp, synthetic construct
  source 1..110: mol_type = other DNA
tgccgaacctgctgtggattttgggcttctgtttctgactccttttcagatgcttctgcccttctcaaggcagggtccacccagctctggttctgggtcctggcttctga

SEQ ID NO: 74500 - DNA, 110 bp, synthetic construct
  source 1..110: mol_type = other DNA
aataaccaagaagattgatttttcctgtctcataacacatcctcaaaacagctgtcctggtgctttctcctcacgttgccttctgtccctccagagcttgggccactgga

SEQ ID NO: 74501 - DNA, 110 bp, synthetic construct
  source 1..110: mol_type = other DNA
atgtctctgaaactcactttcttcacctgtatcataagattattgataaagcgagtgtcgtaaggaaaatgtgagaaaatgtgcacaagttgcctggaagaacatcaaga

SEQ ID NO: 74502 - DNA, 110 bp, synthetic construct
  source 1..110: mol_type = other DNA
tgtcgtaaggaaaatgtgagaaaatgtgcacaagttgcctggaagaacatcaagacatagtaagcatattctaaaccttcattcctttccattcttggagatttctagaa

SEQ ID NO: 74503 - DNA, 110 bp, synthetic construct
  source 1..110: mol_type = other DNA
acggttctctttccgtagctgcacttaggatttagaaaatccttctgagtattgcttcttccttgacttcctttggctcaatctgcagggagaactcgtgcactcactca

SEQ ID NO: 74504 - DNA, 110 bp, synthetic construct
  source 1..110: mol_type = other DNA
attccaggagaaacatggctttcaaggaaagtataggtgtgtttatccgacaatgaaaaacacaaattctattgactgttttcgcccagtcttgcccacaatgtgaggac

SEQ ID NO: 74505 - DNA, 110 bp, synthetic construct
  source 1..110: mol_type = other DNA
aaaaacacaaattctattgactgttttcgcccagtcttgcccacaatgtgaggacaattagggtgctgaatacgctattcgagagcagcaatcctttgatggccaattct

SEQ ID NO: 74506 - DNA, 110 bp, synthetic construct
  source 1..110: mol_type = other DNA
ggtgatgacgtcttgcagctccggggttaggctgtcgaacaggtggatcgtgtcagggtttagctgaaaagagaggcaggcaagcgtagaggcccttctcataaccagtg

SEQ ID NO: 74507 - DNA, 110 bp, synthetic construct
  source 1..110: mol_type = other DNA
gggtttagctgaaaagagaggcaggcaagcgtagaggcccttctcataaccagtgggccgactcgcccagcacaacccgccagcttggacttagggggtcttaagaggta

SEQ ID NO: 74508 - DNA, 110 bp, synthetic construct
  source 1..110: mol_type = other DNA
ttcaccagactcagatttccttgcttacagccaagcaatgccccctggtccttagttctgctctgctggattaaactggtgacccctggtgaccacccccaggccctccc

SEQ ID NO: 74509 - DNA, 110 bp, synthetic construct
  source 1..110: mol_type = other DNA
taactgacttacaacactggttagttccgggggtacagggaaagtgactcggcagtttgcaggttataccccgttacaggttatgacaggttggcaggtgtcagtccctg

SEQ ID NO: 74510 - DNA, 110 bp, synthetic construct
  source 1..110: mol_type = other DNA
ggctccttgcagggtttagctgaacgactgcaagctgcagtgcggttctagcaactgggccagagacgtgggccgagggtggggcattttgtcccgcagaccacgtgctg

SEQ ID NO: 74511 - DNA, 110 bp, synthetic construct
  source 1..110: mol_type = other DNA
tggcaagtggtcgcttggaaggaacctcgctaacctgcagagtctcctgaggtttctaataaaacacactggggccgagggcccagggttctctcggctgcggggcctcg

SEQ ID NO: 74512 - DNA, 110 bp, synthetic construct
  source 1..110: mol_type = other DNA
tttttggagacagtgcagatggtattaggaaggtgggggccctcagggaggcagcttttgagaaggtgtccatccctgcacatggggttggaagagtgaaacctctggag

SEQ ID NO: 74513 - DNA, 110 bp, synthetic construct
  source 1..110: mol_type = other DNA
ttttgagaaggtgtccatccctgcacatggggttggaagagtgaaacctctggagtcagctaaacacctgcctctcgccttcctctaagaagaaaggtcgtgaccagctg

SEQ ID NO: 74514 - DNA, 110 bp, synthetic construct
  source 1..110: mol_type = other DNA
agcgtaggtgcgtcattaaacaccaaggcaaagcgcccggttagagacgcggatgacctccggacaagctttttttctgaacctcggcgcccccgtccagccctcagcgt

SEQ ID NO: 74515 - DNA, 110 bp, synthetic construct
  source 1..110: mol_type = other DNA
taagctgacctaaaagccacagttgcctgtgactgtctttgcagcaagtaaatcccatttcagttgatcctttttctgggaaatcgatacttgacaagttttctgaaatg

SEQ ID NO: 74516 - DNA, 110 bp, synthetic construct
  source 1..110: mol_type = other DNA
tcgtctcacgtggagacaatgggaagaaaaaggaaaaaagaaagaaaaaggtacttttcctgtgatgaagattcttaggatcgactgactgtccgaacaactcggggatc

SEQ ID NO: 74517 - DNA, 110 bp, synthetic construct
  source 1..110: mol_type = other DNA
caaaaaaaaaaagaactaaatgtaggactagcatattacccagcagtcccactcctgggcgtctgtctggagaaaaccatagtttgaaaaggtaaatgcacccccgtgtt

SEQ ID NO: 74518 - DNA, 110 bp, synthetic construct
  source 1..110: mol_type = other DNA
tgggcgtctgtctggagaaaaccatagtttgaaaaggtaaatgcacccccgtgttcactgcagcactgtatacacagccaagacatgctaacaacctaaatgcccaccaa

SEQ ID NO: 74519 - DNA, 110 bp, synthetic construct
  source 1..110: mol_type = other DNA
gttccggggggcttggggtgctcctcgagtctccatctgtcacaggtccctgcgggactcggctggctgacttctgtagggacaggactctacagacctgaggtcgagga

SEQ ID NO: 74520 - DNA, 110 bp, synthetic construct
  source 1..110: mol_type = other DNA
cagctgcccccaccctagcccggcactggagcccccgccccaggcccctcccctcccaggtcctctgcagtcttgcaagttatagctgccttgtcctttatcacgtgatt

SEQ ID NO: 74521 - DNA, 110 bp, synthetic construct
  source 1..110: mol_type = other DNA
ccaggtcctctgcagtcttgcaagttatagctgccttgtcctttatcacgtgattttaaccttaagcatctgcagctgccatgctgttcaggaacagcttccagtagaat

SEQ ID NO: 74522 - DNA, 110 bp, synthetic construct
  source 1..110: mol_type = other DNA
catcagcttgaaaaaatctaactggtggtctcagagctgctcagggattctagcgcacgcggggggctgctgtcttggggagaaactcaggggggcgttcagggacctga

SEQ ID NO: 74523 - DNA, 110 bp, synthetic construct
  source 1..110: mol_type = other DNA
ctcactctttaataacagctgtgcactaaaatacagttcacactgctccaccgtcttcgtctctgcctccacaaggccacacagattgtttggttggaatcgtcaatcct

SEQ ID NO: 74524 - DNA, 110 bp, synthetic construct
  source 1..110: mol_type = other DNA
ttcgtctctgcctccacaaggccacacagattgtttggttggaatcgtcaatccttggcatgtccatttacattccacatccagagttatttctctctctctctctcttc

SEQ ID NO: 74525 - DNA, 110 bp, synthetic construct
  source 1..110: mol_type = other DNA
tgctccctttgaaaacatgctgccctaaactgagcaaaatgcctcaggtgtaactgacttcacaacggcttcgagatcaaagcagatgtttctgccgctacctcgtggcc

SEQ ID NO: 74526 - DNA, 110 bp, synthetic construct
  source 1..110: mol_type = other DNA
gacttcacaacggcttcgagatcaaagcagatgtttctgccgctacctcgtggccatggacaactgctgacccctgcgtttctgccgccagggacttgatcctctccttg

SEQ ID NO: 74527 - DNA, 110 bp, synthetic construct
  source 1..110: mol_type = other DNA
tcctcagcctactttaaaaaaaaaaatgagctgtcttttcatgtcatctgcatctgttattcacatatcctggatacaattctcttatcagatatgtactttgaaaatat

SEQ ID NO: 74528 - DNA, 110 bp, synthetic construct
  source 1..110: mol_type = other DNA
gttattcacatatcctggatacaattctcttatcagatatgtactttgaaaatatttccttccactctgtgaactgtctttgtattttcttcatgggaaggataggcttt

SEQ ID NO: 74529 - DNA, 110 bp, synthetic construct
  source 1..110: mol_type = other DNA
attttcaaaaacgaatatggcaacaaataaaggacttctctactgtcttctagactaatccatgtcagatttatccaccaagcaattgccaccccagacaatactaaaat

SEQ ID NO: 74530 - DNA, 110 bp, synthetic construct; identical to SEQ ID NO: 74529
  source 1..110: mol_type = other DNA

SEQ ID NO: 74531 - DNA, 110 bp, synthetic construct
  source 1..110: mol_type = other DNA
ccagccaccgggcaggtgcgtggcagggaaggaactggcagtagtgggagtgtgttcgagatttccgtttgtctggcccctctttggagcaggcatcaggctgagtgatg

SEQ ID NO: 74532 - DNA, 110 bp, synthetic construct
  source 1..110: mol_type = other DNA
tatttgtatatatcacaaaatgatcaccacaacatgtgcaataaacacccaccatctcacacaggtacgcagtttttcctgtgatgagaacttgtcaacctcctccctcg

SEQ ID NO: 74533 - DNA, 110 bp, synthetic construct
  source 1..110: mol_type = other DNA
ggatggctcccgcccgggcacggacataagtgagcccgtctgagtccttcgccgtgacggctggtgttttcagaaggtgggtggaaatgagcattttcttatttctgctc

SEQ ID NO: 74534 - DNA, 110 bp, synthetic construct
  source 1..110: mol_type = other DNA
tccgtgctccctttaagcctgtgccccgtgaggaatcctcttcagtttggccgtggacgaggaccttagcaggaagaagtcagactttgtcacacgcccagtcagtgcac

SEQ ID NO: 74535 - DNA, 110 bp, synthetic construct
  source 1..110: mol_type = other DNA
tgacgcttcttccctgtcggcgacaaaacaggccgacaccagacttgcgtcttagctgtatttttatatttccccagtttactgaaaacaatcttttctgacatttatcc

SEQ ID NO: 74536 - DNA, 110 bp, synthetic construct
  source 1..110: mol_type = other DNA
aaacaggccgacaccagacttgcgtcttagctgtatttttatatttccccagtttactgaaaacaatcttttctgacatttatccatatggggaattttagttatctcaa

SEQ ID NO: 74537 - DNA, 110 bp, synthetic construct
  source 1..110: mol_type = other DNA
aaaggcaacatttcaaagtcttttatttttggctaagatttatagccaaaataaagatgtatttaaaagttcctatagatagccctctcataattgagagtccattgagg

SEQ ID NO: 74538 - DNA, 110 bp, synthetic construct
  source 1..110: mol_type = other DNA
agtagggagctccactaggtaatagaaggtaaaatctgcaaaactttttaaaacgaaatgcctagacctttagacctccttagggtgcggcttcctcggtgtcaggggct

SEQ ID NO: 74539 - DNA, 110 bp, synthetic construct
  source 1..110: mol_type = other DNA
tgggggtctgtgcccaccgagagctccccgagggattcccagcatccctagattgggagggcttctctccagtatgagctctcacgctgaaccgagacccgaatgaaagc

SEQ ID NO: 74540 - DNA, 110 bp, synthetic construct
  source 1..110: mol_type = other DNA
tctgattataatgactcttggtatagatttctttgaatgtgtcctagtcagtttgttgagctttttggatgcgtagattcctgactttcgtcaaactgaagacgttctgg

SEQ ID NO: 74541 - DNA, 110 bp, synthetic construct
  source 1..110: mol_type = other DNA
cttgtccttgttacaaaagaatgggaaacagaagcttcagagcttcatggaaatgagagcaaggaagggccttaaaagtcatggaggacatgtgacaaagaaatgaaaac

SEQ ID NO: 74542 - DNA, 110 bp, synthetic construct
  source 1..110: mol_type = other DNA
gcacggccagaaaaagagagagagaaggaaagaaacatcagagtgtctttgaatgcttgtggaaataatagtgacaagcaggcgatgcagcgtaggagagagctgagcag

SEQ ID NO: 74543 - DNA, 110 bp, synthetic construct
  source 1..110: mol_type = other DNA
cttgtggaaataatagtgacaagcaggcgatgcagcgtaggagagagctgagcagctctgagagtgcaagagggagcaggctccagttcatcagaggaggcactgcctgg

SEQ ID NO: 74544 - DNA, 110 bp, synthetic construct
  source 1..110: mol_type = other DNA
aggaggtgtgactgagaagcaaggagaccttccgagaaggcgcttggcgcacacgctagccggctgccagcttcgggaggagcggaggtcccaggcctttctgccacact

SEQ ID NO: 74545 - DNA, 110 bp, synthetic construct
  source 1..110: mol_type = other DNA
cttataaagtattctgtgctttggtttataatccagcgtgactttttttcctccaaatgttccatttggtcattgggagctcttatctggcaccatcgcccctttgacag

SEQ ID NO: 74546 - DNA, 110 bp, synthetic construct
  source 1..110: mol_type = other DNA
agagagacctgtgttttgctgtccaccgttgcacctgggtatcccgtgggtgcgtggctgctcttcccgtctgagccagctggagccagatggccccagcggggctggta

SEQ ID NO: 74547 - DNA, 110 bp, synthetic construct
  source 1..110: mol_type = other DNA
agtattttttcttcgtgtaactataaattcagattctatcctgcaacccagccagcctgtgtatagagatataaatagagcgaaagctataagaactaaatttgctaatg

SEQ ID NO: 74548 - DNA, 110 bp, synthetic construct
  source 1..110: mol_type = other DNA
cggcctgagcaccagagggcaggccgccgcccctccctcccccctggccccggaatggctgacctgatgcagggccgtcaggccgtcctcattggctaggtcggggctga

SEQ ID NO: 74549 - DNA, 110 bp, synthetic construct
  source 1..110: mol_type = other DNA
ggccgggagcaggcccggaggagggtgcgtgggcctaagggaccagcgattgttggggggcctgacctggcccaacacccatgcttcccaggaaagagacagcagaggcc

SEQ ID NO: 74550 - DNA, 110 bp, synthetic construct; identical to SEQ ID NO: 74549
  source 1..110: mol_type = other DNA

SEQ ID NO: 74551 - DNA, 110 bp, synthetic construct
  source 1..110: mol_type = other DNA
cagctaggaaacaaggcttaacaccaggactaactgaagcttctgcctcccggaaaaggcagcctcgaagtctcgggtcagcaccaacgaggcccctgccgcgtgggccc

SEQ ID NO: 74552 - DNA, 110 bp, synthetic construct
  source 1..110: mol_type = other DNA
cgaacctgggtcctcacagatgctggtcagattcgtttccgctgagccatgacaggaaccctaggtgaagggttttttctttttgtctctttgctatttctttgggccgc

SEQ ID NO: 74553 - DNA, 110 bp, synthetic construct
  source 1..110: mol_type = other DNA
gtctaattggagctgtagctaggacacacagatctgggccatgagagtggcacatttcttgagaaggagttagaaacttacggaaaatctaagtaggtgatgtcctctgg

SEQ ID NO: 74554 - DNA, 110 bp, synthetic construct
  source 1..110: mol_type = other DNA
tctacgaagtccaaacctgggcccttccaaaggcagctactcccgcctgccccgcctgtgcgacggtcatgctgtcgtttcgtttaatgtctcatgacgttttgcttaag

SEQ ID NO: 74555 - DNA, 110 bp, synthetic construct
  source 1..110: mol_type = other DNA
ggtgccagtaagctttacaatttcgtctgtaatcttcaggaactccaggttccaggtgagacctgaatgaattatcctcagccggggatgcagggaacacggggacttgg

SEQ ID NO: 74556 - DNA, 110 bp, synthetic construct
  source 1..110: mol_type = other DNA
ctgggacctgcccggacgccccgaggcagagtaaactactacacctcggacggccttccatcaggggccagaggctctggctgaggcgtgagctgctgggctgctgggct

SEQ ID NO: 74557 - DNA, 110 bp, synthetic construct
  source 1..110: mol_type = other DNA
ttccatcaggggccagaggctctggctgaggcgtgagctgctgggctgctgggctgagcgaccggcaggtctgatgagctgaaggcaccggcgggagaaccgcgccgagg

SEQ ID NO: 74558 - DNA, 110 bp, synthetic construct
  source 1..110: mol_type = other DNA
agctccccaaagccccacatgatccaaccatccttcctaccctggcacatcaatttttcttccccgaaggcccagcaggtctttgtctcggggcctctgcacggctgttt

SEQ ID NO: 74559 - DNA, 110 bp, synthetic construct
  source 1..110: mol_type = other DNA
aggtttcaagtccagcctgcgagggctgggacccctgctgagggtcacacaggcgtcagccagctctgggtcaaactcattcaggttattggcagagctcagctcctggc

SEQ ID NO: 74560 - DNA, 110 bp, synthetic construct
  source 1..110: mol_type = other DNA
atggctggcagtgccatggggctgctccggggaggcgggctggcaccgggccccaagctggtggggagctggtccagtcactggcctgctaccagggcccaggtcttgta

SEQ ID NO: 74561 - DNA, 110 bp, synthetic construct; identical to SEQ ID NO: 74560
  source 1..110: mol_type = other DNA

SEQ ID NO: 74562 - DNA, 110 bp, synthetic construct
  source 1..110: mol_type = other DNA
tgccaaactggcctccagctgctcgggccgccctgtctgactgcctctaaccttctgctttcttttcacgctgtcctaggaggtcagagcgaaagtaagtacctgcctga

SEQ ID NO: 74563 - DNA, 110 bp, synthetic construct
  source 1..110: mol_type = other DNA
agggcaggaccgcgaatgcgtcagcctgtggtaagaaatcgccccaaatcttcagggtggagtcaccgtccacgggcagctcacggttatgagctgccctaaatcatgac

SEQ ID NO: 74564 - DNA, 110 bp, synthetic construct
  source 1..110: mol_type = other DNA
gcggggcgcagagggctgtgtgtgtgggcctgataacgcggcgcccgggcgtcattggcaataaaggcgcgaagggtttgatttgagtgaaatgtgccacggggaataca

SEQ ID NO: 74565 - DNA, 110 bp, synthetic construct
  source 1..110: mol_type = other DNA
ccttggccctgctattatctcattcatttgacccctcttctcaatgccattggcttctgaaggcggccctctcccttagggtagcgatgggctgccgcgctctgacaccc

SEQ ID NO: 74566 - DNA, 110 bp, synthetic construct
  source 1..110: mol_type = other DNA
cagaagcctggcttcctggacttgaaggggccgtggggtttccccccagagccgggctgggcagagctgagtcccctattccagggctttcttcaagggtcctagcgagg

SEQ ID NO: 74567 - DNA, 110 bp, synthetic construct
  source 1..110: mol_type = other DNA
ctggaatgacacttctctgcagcctcagccatccagtgtcctccctgtcccctgtcccttgggaaccggagctctcccctccccgtggcgcctggccatcccggcccacc

SEQ ID NO: 74568 - DNA, 110 bp, synthetic construct
  source 1..110: mol_type = other DNA
ggctcgtcaggcacttgggtttctcgcgtgatgtccagagtgcgtgcttagcctgccgttgcttgtcctcttacggtttgggagaccctgtgtgtgttaaaggaacgggg

SEQ ID NO: 74569 - DNA, 110 bp, synthetic construct
  source 1..110: mol_type = other DNA
gggtcatacatcagagccggtcctgcctccagaagccctgccacccaacatgcgcgttcttgtatctttgctggaaaatcagaagaggggagatctcccgtggttcattg

SEQ ID NO: 74570 - DNA, 110 bp, synthetic construct
  source 1..110: mol_type = other DNA
ctgggcttcccgagtacagcgtttccacgtgggaagcaggagaggttctggggccggacggcggtggcagctgtgcagaacatgtctctacgtttgctgccacagaacag

SEQ ID NO: 74571 - DNA, 110 bp, synthetic construct
  source 1..110: mol_type = other DNA
ggacggcggtggcagctgtgcagaacatgtctctacgtttgctgccacagaacagaacatttaaaacggttaaaatcaccgattttataaagtgtctatttcatcacaat

SEQ ID NO: 74572 - DNA, 110 bp, synthetic construct
  source 1..110: mol_type = other DNA
ctggaggctgggctgcactgggagtcgggcagtgggtgggcagggtgggtggcgtgtcgcccacgaggggaggcggagcgggtagcttgatgtttaattgcactccgcac

SEQ ID NO: 74573 - DNA, 110 bp, synthetic construct
  source 1..110: mol_type = other DNA
cattccttggctggatcgccgggacgcgcaggtcagaagcttggtttctacgcctcgtgtgcgagtcacgcgcgtgcccgtttagccaacattattgctccctgatgttc

SEQ ID NO: 74574 - DNA, 110 bp, synthetic construct
  source 1..110: mol_type = other DNA
tcaaggtcacagagaccaaggattgtctccccatagactgcgttctggtaacggtaaatcagggagaaaatgataagtatcaaagctatttaaataagacaagtcacttg

SEQ ID NO: 74575 - DNA, 110 bp, synthetic construct
  source 1..110: mol_type = other DNA
ccaacccccaaagcacttctggactttcaacggctccccccagaaggctgaggggtggttatgcagacggcaccttgagtagctccctataatttcccaggattcctgag

SEQ ID NO: 74576 - DNA, 110 bp, synthetic construct
  source 1..110: mol_type = other DNA
cctctctccaggcaatctctccacctgctgctcccatccagctactaagtcaggcccccagcgactgtcacctcctccactgggcccccagacccccatcacagcagaga

SEQ ID NO: 74577 - DNA, 110 bp, synthetic construct
  source 1..110: mol_type = other DNA
ccgacccgatcaatacgccgagtgcctgggccgggctcagagatgcccgccgcgctccttcggcagcctgggtaaatgggcgccagaagcataaatacttggttcaaacg

SEQ ID NO: 74578 - DNA, 110 bp, synthetic construct
  source 1..110: mol_type = other DNA
gcctgggctgcagtgctcttaggagcctctgcatttccaccaatcaaatgggggtgagctctccctgatgggaccgtggtggcctttagaaataacccattcgacaaccg

SEQ ID NO: 74579 - DNA, 110 bp, synthetic construct
  source 1..110: mol_type = other DNA
cgtctttgtcctttggggaccaaagacacagaacaccatgccctcaaggtccatccgtgctgcagcaggtgtcaggagctccctcctttttaaggggggatctttctgtg

SEQ ID NO: 74580 - DNA, 110 bp, synthetic construct
  source 1..110: mol_type = other DNA
tctgaggacaggagttttactcatactgagttcccggcttctagaacagcaccggacacacagtacctgcccaataaatgctacacagacggtgagcagatgggggctgc

SEQ ID NO: 74581 - DNA, 110 bp, synthetic construct
  source 1..110: mol_type = other DNA
acacacagtacctgcccaataaatgctacacagacggtgagcagatgggggctgcatagggtcattgagggattaaatgggtgacacaggaggaagacttccacaaaatt

SEQ ID NO: 74582 - DNA, 110 bp, synthetic construct
  source 1..110: mol_type = other DNA
aatacacaaccatcttcgatgtgtgagaaccacgttacagctccaaaatatacaaagaaaacaatggagacaacataagggagaaatagacaaatccacaagcatatgtg

SEQ ID NO: 74583 - DNA, 110 bp, synthetic construct
  source 1..110: mol_type = other DNA
ccaggcagctggctcagaaccccccgcccttcccacactgcctgcattctggccactctctccatggatggccacagcccagcctcctctctctgctagtgatgggcctt

SEQ ID NO: 74584 - DNA, 110 bp, synthetic construct
  source 1..110: mol_type = other DNA
ctctctccatggatggccacagcccagcctcctctctctgctagtgatgggcctttccctccctgcccaccactttgctccccctcagtcttcagagacaaccaatattc

SEQ ID NO: 74585 - DNA, 110 bp, synthetic construct
  source 1..110: mol_type = other DNA
tggcagcacatctgcttgaagcaatcagggagggctctctgaaagaagaggcacatctaaactaaagaaagctgactggtgaataagaaggtatagtcagaattatttta

SEQ ID NO: 74586 - DNA, 110 bp, synthetic construct
  source 1..110: mol_type = other DNA
gttcacattctataaaaacctatttggggtaagctctcatttttaataagtatttaagccctacaatagcacaccacatccaggaatgtttgacggctttatttttagcg

SEQ ID NO: 74587 - DNA, 110 bp, synthetic construct
  source 1..110: mol_type = other DNA
taattggctcagaaagactgggcagttgggcagccaggtgaagcagttgacgttgtagtatcgagggagagactgggcagttcccgagaggcagggggtggcagtgggga

SEQ ID NO: 74588 - DNA, 110 bp, synthetic construct
  source 1..110: mol_type = other DNA
accctgcgaatgtgccttaacgccactgaactgtacgtctttcacggttaaaatggtgattgtgacacgagtttcaccatgattacaaaaacacgacccagaccaacccc

SEQ ID NO: 74589 - DNA, 110 bp, synthetic construct
  source 1..110: mol_type = other DNA
gtgattgtgacacgagtttcaccatgattacaaaaacacgacccagaccaaccccagagggcgcgggaagcacgtacgtgcagggggcggtagtactgggcgaccacgcc

SEQ ID NO: 74590 - DNA, 110 bp, synthetic construct
  source 1..110: mol_type = other DNA
gactctcatcagcgtctcccccacccccaaacatggggcactttcagtcttccctgcaggctgcctaggaaacacgttccccactctggcctgcacccgccccaggtcac

SEQ ID NO: 74591 - DNA, 110 bp, synthetic construct
  source 1..110: mol_type = other DNA
agtcttccctgcaggctgcctaggaaacacgttccccactctggcctgcacccgccccaggtcaccttcccacccccccgtgggaagctgggctcccctctgaactccag

SEQ ID NO: 74592 - DNA, 110 bp, synthetic construct
  source 1..110: mol_type = other DNA
gcccagggtgaggctgctctgacgcaggacctcagtatttctgaacttttaacggtcgggacaggcacacacgcttccttcgcagctaactatgctccttcctgaggcta

SEQ ID NO: 74593 - DNA, 110 bp, synthetic construct
  source 1..110: mol_type = other DNA
ccagagtgctgccttccctttggagctggccaccgtcccagctcttttcctgtccccaaggcataggtggcatttccatccagctgagtcactcgggttttttccaggtg

SEQ ID NO: 74594 - DNA, 110 bp, synthetic construct
  source 1..110: mol_type = other DNA
tttacatgcaatgaaatggcactattctctaattatttctttaatcatatacaatgtaaaggtcatttttagctcatgggctgtacaaaaacaagcagtgtggaccagtc

SEQ ID NO: 74595 - DNA, 110 bp, synthetic construct
  source 1..110: mol_type = other DNA
gactgtgctgaagcaccgctctggttgtcaggacatttaagaagctcctctgcacttggttgcactggggacatggccagcaggcggttggaaacatctttgaggcgtgc

SEQ ID NO: 74596 - DNA, 110 bp, synthetic construct
  source 1..110: mol_type = other DNA
cacaggaaatgggggggcgggggttacccccaaagacacagacacgtagctacgggaaacccagtgccagctttaaggacaccagccgctcaccactgtatctacacggt

SEQ ID NO: 74597 - DNA, 110 bp, synthetic construct
  source 1..110: mol_type = other DNA
tcgaacctgcaacctcatggttcctagttggatttttttcctctgtgccatgacagaaactcttatcttctctttctgacttagttcacttggtaagaaaactctagttc

SEQ ID NO: 74598 - DNA, 110 bp, synthetic construct
  source 1..110: mol_type = other DNA
agttggatttttttcctctgtgccatgacagaaactcttatcttctctttctgacttagttcacttggtaagaaaactctagttccagccctgttgctgcaaatggcatt

SEQ ID NO: 74599 - DNA, 110 bp, synthetic construct
  source 1..110: mol_type = other DNA
cagttaagcatgaattgaggtgacgattgaacgtgactttgggatgatgaaatagtcattgacgtggggtataaacgactaaatttgaccctgtgattaattcatttact

SEQ ID NO: 74600 - DNA, 110 bp, synthetic construct
  source 1..110: mol_type = other DNA
aagccagctgcacactcggcctcacttccccttcagcccgtcttcacatggctctggagaacgaccacatcttcctaagtagccgcagtgccgctctcgcacccatgggc

SEQ ID NO: 74601 - DNA, 110 bp, synthetic construct
  source 1..110: mol_type = other DNA
ggagaacgaccacatcttcctaagtagccgcagtgccgctctcgcacccatgggctccagtgctggcacagtggtgctgtctagtaaacgcgctgctaattactagtgga

SEQ ID NO: 74602 - DNA, 110 bp, synthetic construct
  source 1..110: mol_type = other DNA
ttctacccatcagcttcctcttctccccattccagagcccttcaggctagctctttctccgttggctcagcctcccctaactcttgttgcaccccttgcacggcttgctc

SEQ ID NO: 74603 - DNA, 110 bp, synthetic construct
  source 1..110: mol_type = other DNA
tctccgttggctcagcctcccctaactcttgttgcaccccttgcacggcttgctcttgggtcctataaaatgctgtcagttttcggtatgtatgcacttatcaaaatatt

SEQ ID NO: 74604 - DNA, 110 bp, synthetic construct
  source 1..110: mol_type = other DNA
tttttatgtgacggagaagagtgatttcacgcttaaaaaagccatcccatgcgacagaactaactgtaactctttcactgagacgttcctatgtatcattctaggctgag

SEQ ID NO: 74605 - DNA, 110 bp, synthetic construct
  source 1..110: mol_type = other DNA
agaactaactgtaactctttcactgagacgttcctatgtatcattctaggctgagcattagcaaaccttctcaagaagatgcgacttgcccaaggccacacagctagcag

SEQ ID NO: 74606 - DNA, 110 bp, synthetic construct
  source 1..110: mol_type = other DNA
ccttctatcctttggcttatctgcttctttatttcttccttggatttgtgcagggctctgactcagctcaatcaagatcataggagaagactcttccaccctcagcgggc

SEQ ID NO: 74607 - DNA, 110 bp, synthetic construct
  source 1..110: mol_type = other DNA
aatgagcatcttctatgaatgtcatccaggtagaacatgacattgcaggtaacacacctgtctggcgcctgactcaggccagctctcgagaatgagtggcttcctttgtt

SEQ ID NO: 74608 - DNA, 110 bp, synthetic construct
  source 1..110: mol_type = other DNA
atatgtaatgtgtgggtttttttggtagaccatatagtttggcctttcttttcactttccaaactgaaaagcttctatgatatttctatgaaaggcttctatgatatgta

SEQ ID NO: 74609 - DNA, 110 bp, synthetic construct
  source 1..110: mol_type = other DNA
acagacattggcaaatagaaggcccctaaagccacggaagtaggtaaaattccatcaaaagagttggtaggtgaagacgggtggggtcttggctccacctgtgcccatca

SEQ ID NO: 74610 - DNA, 110 bp, synthetic construct
  source 1..110: mol_type = other DNA
caaaagagttggtaggtgaagacgggtggggtcttggctccacctgtgcccatcaccatggagaagttgaaaggaggtggcaccaaagtgcgaggctagttgaataacac

SEQ ID NO: 74611 - DNA, 110 bp, synthetic construct
  source 1..110: mol_type = other DNA
acacacacacacacacacacaagagcttgatgagggctttattgtcaaatcagagtggctgttggaactgtgataagaatgtcgccttgccacccacatagaagtggtga

SEQ ID NO: 74612 - DNA, 110 bp, synthetic construct
  source 1..110: mol_type = other DNA
tggctgttggaactgtgataagaatgtcgccttgccacccacatagaagtggtgaccttctcctttctcattctccccccactgcctaactttctctggctgctattcag

SEQ ID NO: 74613 - DNA, 110 bp, synthetic construct
  source 1..110: mol_type = other DNA
ggccagcagaggcgtccctgaactctgcttctccaactcctctgtcgatggaatatctcactgctccaaaaatagagctttttcttgctgaacccagactaataaaatga

SEQ ID NO: 74614 - DNA, 110 bp, synthetic construct
  source 1..110: mol_type = other DNA
tctcactgctccaaaaatagagctttttcttgctgaacccagactaataaaatgatggatatgcgtatttcaaccacacgccattgtgtcctgtgttacagacctaatct

SEQ ID NO: 74615 - DNA, 110 bp, synthetic construct
  source 1..110: mol_type = other DNA
aagtgggttgttacggaaagctacaactttttaaattttgtgtacattaagaaccagctgcagatcttgttaaaatgcagacttctgggccttgccactcacaaggtctg

SEQ ID NO: 74616 - DNA, 110 bp, synthetic construct
  source 1..110: mol_type = other DNA
agctgcagatcttgttaaaatgcagacttctgggccttgccactcacaaggtctggttttgtaagttctctggtccaggaatcttcgtggaccctgaagaattgaggcct

SEQ ID NO: 74617 - DNA, 110 bp, synthetic construct
  source 1..110: mol_type = other DNA
cgtgtgatgatggattgtgagagatgtgtgggtgggaagtagctgtcagggatcttttttatttgtccaaagtgtgaaggaaagaacacaattgttagagaacttagaat

SEQ ID NO: 74618 - DNA, 110 bp, synthetic construct
  source 1..110: mol_type = other DNA
gtcccagcgcatggtgtggatgcaggtctgctagaacaaaacattaatcagaacgtgctgtccccgcaccttagcactgcactggcggggcctcaggacactggcaggct

SEQ ID NO: 74619 - DNA, 110 bp, synthetic construct
  source 1..110: mol_type = other DNA
tgctgtccccgcaccttagcactgcactggcggggcctcaggacactggcaggctaacagcagaaggagaggccaggctctctcaggagccacacgacagggaatccagc

SEQ ID NO: 74620 - DNA, 110 bp, synthetic construct
  source 1..110: mol_type = other DNA
acttcccaaatcacttccctcctcttccttcaacagctggataccaaagtgaaaaatggacatctccagaaatgagcagtgaccaggccagtgccaactccccttggagc

SEQ ID NO: 74621 - DNA, 110 bp, synthetic construct
  source 1..110: mol_type = other DNA
cggaatgagataatgtatgcgttgctgctgcggtggggcaagacaaattgtagaggctcaacagaagctatttcaatttcttcccatcctttcccttgtcttctgacatc

SEQ ID NO: 74622 - DNA, 110 bp, synthetic construct
  source 1..110: mol_type = other DNA
gctcaacagaagctatttcaatttcttcccatcctttcccttgtcttctgacatcttccaaaaagtggaaagatagatatgtcaatgacagagagatgaaaagaagcgtc

SEQ ID NO: 74623 - DNA, 110 bp, synthetic construct
  source 1..110: mol_type = other DNA
ctttcctaatggcaactgctgccacccaattgatcatccttggtcatgagtgatcctaaataatgagagcagcagcctggcagtggcaggacagatgagctccaggaaga

SEQ ID NO: 74624 - DNA, 110 bp, synthetic construct
  source 1..110: mol_type = other DNA
ctaaataatgagagcagcagcctggcagtggcaggacagatgagctccaggaagaggaagcaggaacgacagctactgatgagagttcacctttggaatgaatgaaactt

SEQ ID NO: 74625 - DNA, 110 bp, synthetic construct
  source 1..110: mol_type = other DNA
ggccccttccttgctagtctatgaaggcagcacagcacaggctacagacttaggatttggagtcacagctgaaaggctggttcctcgtgggatgttgggaaggatgagct

SEQ ID NO: 74626 - DNA, 110 bp, synthetic construct
  source 1..110: mol_type = other DNA
ctttgctgagaaaatctcacataaaattgggaaaatgaagttcttcatttcattagtcttagcctgcatcgttaacatgccggatacatgaaactctcaggtttgatgga

SEQ ID NO: 74627 - DNA, 110 bp, synthetic construct
  source 1..110: mol_type = other DNA
gtcttagcctgcatcgttaacatgccggatacatgaaactctcaggtttgatggaaacagtccacgtctgagaaggcgacacttccaattcagagagaggcatgattcaa

SEQ ID NO: 74628 - DNA, 110 bp, synthetic construct
  source 1..110: mol_type = other DNA
ggaaagacagaccttgagacctggctcaactgtggcaggcagaggaagaagagatgcgggcatgtaggtgcatgtgcatggcagaccccacagactgcatcttctttcac

SEQ ID NO: 74629 - DNA, 110 bp, synthetic construct
  source 1..110: mol_type = other DNA
gcgggcatgtaggtgcatgtgcatggcagaccccacagactgcatcttctttcacagattttgtttagggcaggtctctatggcagcaacgggctgtcttcacggcacac

SEQ ID NO: 74630 - DNA, 110 bp, synthetic construct
  source 1..110: mol_type = other DNA
gtgggtgcagccaaataaaaaagacaccttgatatgaaaaaagaagaaagttaagagtaaggatgtagttaagctttttaatggcaaagctgttgcgaatttatgtggat

SEQ ID NO: 74631 - DNA, 110 bp, synthetic construct
  source 1..110: mol_type = other DNA
gggcccaactcatgggctgcagcccagcatagctcacatcaaaagcaggtggctgaggcgttcccgctgcaactgccgtttggatctgatccctggcccaggaactccac

SEQ ID NO: 74632 - DNA, 110 bp, synthetic construct
  source 1..110: mol_type = other DNA
aatattgcattttgacagcataaacgattataaaaaaatcaatagttggagaatgctgaagagtcttctaagctcttgcacgaaaagcaattagtatggattgatttact

SEQ ID NO: 74633 - DNA, 110 bp, synthetic construct
  source 1..110: mol_type = other DNA
accctaattgctggggaaaaaaaccaagcctcctaccccagagcttaaacacaaacaggagcgtattttacctgaaaggatcaactgattgatcaacaatcaactgttga

SEQ ID NO: 74634 - DNA, 110 bp, synthetic construct
  source 1..110: mol_type = other DNA
gcaaacatttcttataaaaaaccaggtagatagttcaggccttgtgggctatcggggtctctgttgcagctctgctgtcaccctgaaagcaggcattggcagtacataaa

SEQ ID NO: 74635 - DNA, 110 bp, synthetic construct
  source 1..110: mol_type = other DNA
atggacccttcctttccatgcgttagaggcttcgatgtgcacgtggacacacatggactccgtgtcctagctcagtgctccgaaaactttattgtgcctgcagatcacgc

SEQ ID NO: 74636 - DNA, 110 bp, synthetic construct
  source 1..110: mol_type = other DNA
ttttaattgtcattgtatttttagtcttactgagatatttcctgcttggaggcagttaccttttttatctcttctaggtgctcttctttctgcttcctgtttgtcttttc

SEQ ID NO: 74637 - DNA, 110 bp, synthetic construct
  source 1..110: mol_type = other DNA
ttaccttttttatctcttctaggtgctcttctttctgcttcctgtttgtcttttcaaggagtattgtcttttgcaagttgttgatgaaaccaaccaaatgggtataagtt

SEQ ID NO: 74638 - DNA, 110 bp, synthetic construct
  source 1..110: mol_type = other DNA
atcaccatgcctgaaacactgtcattattgagtcatccttctgaagtatttcttcctccaggtatccttggtaaaacaaactacatttgtgggaagagtggtatcttaaa

SEQ ID NO: 74639 - DNA, 110 bp, synthetic construct
  source 1..110: mol_type = other DNA
ctccaggtatccttggtaaaacaaactacatttgtgggaagagtggtatcttaaacctcaaaaatgttcgtgtgacttggaggcgtgcaaggagtctaagctcagagttc

SEQ ID NO: 74640 - DNA, 110 bp, synthetic construct
  source 1..110: mol_type = other DNA
tggcaagtgggaagaccagtaggctcttaatctagggcttcatctcttaagtaagacaagtgcatcagaccagctttgcagtcctcccacccaggacattctatgatgga

SEQ ID NO: 74641 - DNA, 110 bp, synthetic construct
  source 1..110: mol_type = other DNA
acaagtgcatcagaccagctttgcagtcctcccacccaggacattctatgatggaaggtcattgagttagataagcagtagcccagtaagaggtttttattacaggcatg

SEQ ID NO: 74642 - DNA, 110 bp, synthetic construct
  source 1..110: mol_type = other DNA
ggatgctcttgcctccaagttggtcctacaggagccccctcaacagatattcggggtcttcagaatggatgctgacatcccttcacttatccagacaaggtaagaccccg

SEQ ID NO: 74643 - DNA, 110 bp, synthetic construct
  source 1..110: mol_type = other DNA
gtcttcagaatggatgctgacatcccttcacttatccagacaaggtaagaccccgaaagagatggaaactctcctgctcaggacttttgataagtcagggccactcaagt

SEQ ID NO: 74644 - DNA, 110 bp, synthetic construct
  source 1..110: mol_type = other DNA
aaattctctcttaaatgacataactgcagttcagagaggggaagctttacccaagacagtggaattagtgtaagagcagaccaggattagaagtgaggtcacctgactct

SEQ ID NO: 74645 - DNA, 110 bp, synthetic construct
  source 1..110: mol_type = other DNA
acagtggaattagtgtaagagcagaccaggattagaagtgaggtcacctgactctaaatccaggctccttgcctacagacaagaggattatagctggcttattggttgtc

SEQ ID NO: 74646 - DNA, 110 bp, synthetic construct
  source 1..110: mol_type = other DNA
tgctgcatgagccttcttagcctggatgcaggtgcagcccagaagttttcactggaaacctacgcccaaggcagcacaggatcctgtagatgaacactcagccttctcac

SEQ ID NO: 74647 - DNA, 110 bp, synthetic construct
  source 1..110: mol_type = other DNA
aaacctacgcccaaggcagcacaggatcctgtagatgaacactcagccttctcacccttcattggacaagtccaagggtcatgatcatgtcccagtggacttgacacgtg

SEQ ID NO: 74648 - DNA, 110 bp, synthetic construct
  source 1..110: mol_type = other DNA
ggggcttggctctgcagggaaagcaaaatatttgtccatgcattccccaccattcttacctggtcagtctccaaacctcatcagttcacttcttcgcctgtgctctggct

SEQ ID NO: 74649 - DNA, 110 bp, synthetic construct
  source 1..110: mol_type = other DNA
ttacctggtcagtctccaaacctcatcagttcacttcttcgcctgtgctctggctgatacctgaggagctgaatattgctggaggtaaacccatcacctgctgatgctct

SEQ ID NO: 74650 - DNA, 110 bp, synthetic construct
  source 1..110: mol_type = other DNA
tccctttacaaactccactcccctgggggaaatgataattcatacacctttacttccccacgttctcaacaatgccggaggtcaggagtattgaggggaacacatttaca

SEQ ID NO: 74651 - DNA, 110 bp, synthetic construct
  source 1..110: mol_type = other DNA
ccccacgttctcaacaatgccggaggtcaggagtattgaggggaacacatttacaataattacggtacgtataacacttactgacaccagtgacaatgaggaagttaagg

SEQ ID NO: 74652 - DNA, 110 bp, synthetic construct
  source 1..110: mol_type = other DNA
gtgtggggagacatggggacagaccgccctaaagaacaaggacaggcagggaaacacacacaccccgggaaccagtggccacacaggctgaatacgcagagacagagact

SEQ ID NO: 74653 - DNA, 110 bp, synthetic construct
  source 1..110: mol_type = other DNA
acacacaccccgggaaccagtggccacacaggctgaatacgcagagacagagactacgcctgcagtgtggtccaggcctgtaactggtcagtgtggacattcaaaggtgt

SEQ ID NO: 74654 - DNA, 110 bp, synthetic construct
  source 1..110: mol_type = other DNA
gtcgggtgtgtgaccgtggagccaccacgggaacttcctgtccttcctttttaaggctgaataatattctgctatgtttagatcagacttggcttatccgttcagccatc

SEQ ID NO: 74655 - DNA, 110 bp, synthetic construct
  source 1..110: mol_type = other DNA
gctgaataatattctgctatgtttagatcagacttggcttatccgttcagccatcagcgggtactcgggttgcttcgaccccttggctgtgctgaccctctgatcacaac

SEQ ID NO: 74656 - DNA, 110 bp, synthetic construct
  source 1..110: mol_type = other DNA
ggacacctcactagaaaagacaaacagagcaatgacgttggagaacaagacacttgctctacagccggagcctcgagtacacgggctcagggacattccgaagtcagcac

SEQ ID NO: 74657 - DNA, 110 bp, synthetic construct
  source 1..110: mol_type = other DNA
gctctacagccggagcctcgagtacacgggctcagggacattccgaagtcagcacggaagctccctcatttaacaaatgcccactgagaacgtgctgtgtttcagcctct

SEQ ID NO: 74658 - DNA, 110 bp, synthetic construct
  source 1..110: mol_type = other DNA
accagccacccgacccttcccatgaccttcctaaatcagaattcactcagaaacatgcttgcttatataaaagaaaggatcctgtttcaggggtaaattttttttcttct

SEQ ID NO: 74659 - DNA, 110 bp, synthetic construct
  source 1..110: mol_type = other DNA
tgcttgcttatataaaagaaaggatcctgtttcaggggtaaattttttttcttcttcttcaacaatggacgcttagtcctgaacttttgcctttaactcgactgccctct

SEQ ID NO: 74660 - DNA, 110 bp, synthetic construct
  source 1..110: mol_type = other DNA
accttatcttgccagcattcctggaggaggaccctccccatggggttcagcaactgtacttctgggcccggggtgagcacacggagcagtgggacagggactgacatttg

SEQ ID NO: 74661 - DNA, 110 bp, synthetic construct
  source 1..110: mol_type = other DNA
gtacttctgggcccggggtgagcacacggagcagtgggacagggactgacatttgctgaaacaggaactgccatgtctaccttcgcccacgcttagctatccagggacaa

SEQ ID NO: 74662 - DNA, 110 bp, synthetic construct
  source 1..110: mol_type = other DNA
tgttgcactggtcagaactggactaacccatagtgtctgaaccaaagagtttccacccgagagccactttcctaacccagctttcacgagtgtcagatggcgtgaactgt

SEQ ID NO: 74663 - DNA, 110 bp, synthetic construct
  source 1..110: mol_type = other DNA
gggggaaattctattcccaaggatgggtcattaccaacggtgtccaaaagctctcccgacatgcctgtttttaattggatacgtggaagtttgggcgcctgcacagttca

SEQ ID NO: 74664 - DNA, 110 bp, synthetic construct
  source 1..110: mol_type = other DNA
ccgacatgcctgtttttaattggatacgtggaagtttgggcgcctgcacagttcagaaccagcatctagggatgaaggcaacgttttctgctctgagattcctatgcaga

SEQ ID NO: 74665 - DNA, 110 bp, synthetic construct
  source 1..110: mol_type = other DNA
ttccagccgtaagacctcaggcatcttgctgtttctatacgagcatcctcagcagttaacatgtgagtccctccagctgctcacatgagaaaaggtacatgtaagtgcct

SEQ ID NO: 74666 - DNA, 110 bp, synthetic construct
  source 1..110: mol_type = other DNA
cggcacccgactcagccagcagaaggatgcccgatttgccagtggccctgagtgtcccacccctgaatcctaatcctgcccccgtcccccaccccaagtctccctcagca

SEQ ID NO: 74667 - DNA, 110 bp, synthetic construct
  source 1..110: mol_type = other DNA
cccacccctgaatcctaatcctgcccccgtcccccaccccaagtctccctcagcactgccacctctggccagcccgagagttccctttttttggctcccagttggggatc

SEQ ID NO: 74668 - DNA, 110 bp, synthetic construct
  source 1..110: mol_type = other DNA
tgctgcctgctcctcccctcccaatccacagcccaacttcctcaagctcttccccactcttctttaaaaataaaacccatcagttccagtaggagaagaaaactagaaaa

SEQ ID NO: 74669 - DNA, 110 bp, synthetic construct
  source 1..110: mol_type = other DNA
ctgttacacttcatgaagatgacccagtaagataaacctggaacagcttcacagtggggctcccatccttggaagaccaagtgaagaaccaggatggaaccaaaggagaa

SEQ ID NO: 74670 - DNA, 110 bp, synthetic construct
  source 1..110: mol_type = other DNA
acaggaagaaagttttcctgaaaaagagagaataaagcaagagggagaagtgacgtgttgtgacagatgtgccagcttcttctttcactccctctcttaattgagacctg

SEQ ID NO: 74671 - DNA, 110 bp, synthetic construct
  source 1..110: mol_type = other DNA
aaatttttgattgtagagactgacatatggattgcaccttttggaaggtctgctctgtgtttgaggctttccctgtctttcagagaaatgctacagcttttgtccccaca

SEQ ID NO: 74672 - DNA, 110 bp, synthetic construct
  source 1..110: mol_type = other DNA
tgtgtttgaggctttccctgtctttcagagaaatgctacagcttttgtccccacacaaatgaccttactactgcagttggttagggctaggtctcactactgaattagtt

SEQ ID NO: 74673 - DNA, 110 bp, synthetic construct
  source 1..110: mol_type = other DNA
tcaatggtttgtaataacctacatgggaaaaaataatggatatatttatatggatggcagatttgctttgctgtacacctgacactaatacaacattgttaagtcaacta

SEQ ID NO: 74674 - DNA, 110 bp, synthetic construct; identical to SEQ ID NO: 74673
  source 1..110: mol_type = other DNA

SEQ ID NO: 74675 - DNA, 110 bp, synthetic construct
  source 1..110: mol_type = other DNA
atgaactaaggctcagagatgttaagagcatgtccagggtcaaacaactggtcaataacagagctgagattggaacctgggtctctgtgggtacagagctcatgacttta

SEQ ID NO: 74676 - DNA, 110 bp, synthetic construct
  source 1..110: mol_type = other DNA
gcaaatgacattgtgggaacagaaaaatggcttgaggggaagcctgcttgccacgactttcatctcttcctgtttcgaatgctgagatcacagggctagatgggacccag

SEQ ID NO: 74677 - DNA, 110 bp, synthetic construct
  source 1..110: mol_type = other DNA
cagcacatttggtggcatctctagaccactgggacgccggtttaatccccggccgggacagtgggttaaagatctggtcttgccaccgcaatgatctaggtctcaactgc

SEQ ID NO: 74678 - DNA, 110 bp, synthetic construct
  source 1..110: mol_type = other DNA
agaatgaggctttcaccaaacgtaagccctggtgcctgtcactccacagtcaggaggtggagggaggtggcctcattagttacgtgagccacttatcattaggagcgtct

SEQ ID NO: 74679 - DNA, 110 bp, synthetic construct
  source 1..110: mol_type = other DNA
ggtggagggaggtggcctcattagttacgtgagccacttatcattaggagcgtctggataagatgtgagtgactttcttgtcatgtcctgtgtttatgctggttccctgt

SEQ ID NO: 74680 - DNA, 110 bp, synthetic construct
  source 1..110: mol_type = other DNA
cactggcctggtgacctttctttaaggccccttgatccctctgaatcatggttgccttgtcagctacaccaaggcaaaaacatcagctctgcctgcaaatctctttttaa

SEQ ID NO: 74681 - DNA, 110 bp, synthetic construct
  source 1..110: mol_type = other DNA
ttctggtttttcataatccttgcgtgaaattaaataccttgaacattaatgatactttctttgcgtttatactcggattcccgtgtgactctggtgtatttggaggggca

SEQ ID NO: 74682 - DNA, 110 bp, synthetic construct
  source 1..110: mol_type = other DNA
tttctttgcgtttatactcggattcccgtgtgactctggtgtatttggaggggcattcgttgttctgcatcagcaccatctttgctcgtggtgcccggttaccaccttac

SEQ ID NO: 74683 - DNA, 110 bp, synthetic construct
  source 1..110: mol_type = other DNA
tattaacattcttatttttatttgtcaatccactaataacttttttggggggccgtgtccaaggcatgtggaaattggaaggaagtttgtgggccagggattgaacccat

SEQ ID NO: 74684 - DNA, 110 bp, synthetic construct
  source 1..110: mol_type = other DNA
tttctagcactttcacaaataattgacccccatgattattgaagaagagagagcgaagagattgtgtccatgttaggggaaaaacagttccctattcatgcagaaaagtt

SEQ ID NO: 74685 - DNA, 110 bp, synthetic construct
  source 1..110: mol_type = other DNA
agagtcagggaacccaagccagatggaatatgcaagagcttctgcaagtgtgcgtgtgtgtacgtgtgtgatcttgcacctgttaggtaagcaaccatctaccccagcca

SEQ ID NO: 74686 - DNA, 110 bp, synthetic construct
  source 1..110: mol_type = other DNA
ataggctcataggtgtttatttgtacaagattttcccagctcccaagtggcaaagctgtgctttagattcaggtgtgtatggttgagaaactcagctcgagcagaaaatc

SEQ ID NO: 74687 - DNA, 110 bp, synthetic construct
  source 1..110: mol_type = other DNA
tccaaagttgactctgaactggaccagcggccccctaaaccatgccacaccacaccacagctacacatcacgagctttgcttactccatggtgttcaagtaaccacagcc

SEQ ID NO: 74688 - DNA, 110 bp, synthetic construct
  source 1..110: mol_type = other DNA
tgtgggaggagcagcaggtggagcctggagctttagctggaagactggccttaaaggtcgaccccacctcacttttaactctataaccttggacaaccacttaattctct

SEQ ID NO: 74689 - DNA, 110 bp, synthetic construct
  source 1..110: mol_type = other DNA
ataaataaataaaagaagaggaagctcaacaatgatcttctaggaaaaaggataactgcagctgaataccaaaatcaaaatttccccagttgcagatgaatttaagtgac

SEQ ID NO: 74690 - DNA, 110 bp, synthetic construct
  source 1..110: mol_type = other DNA
agagagagagagagagagagagagagagagaaagaaagaaaggcagaaaggaaagaattccaaagctctctggttctggcttaagtaggccctaggaattcaagtgttcc

SEQ ID NO: 74691 - DNA, 110 bp, synthetic construct
  source 1..110: mol_type = other DNA
aattccaaagctctctggttctggcttaagtaggccctaggaattcaagtgttccttgttcttcatgaaataattccctaaaggttctagtaggtttgctgagagcaccg

SEQ ID NO: 74692 - DNA, 110 bp, synthetic construct
  source 1..110: mol_type = other DNA
cgggagtggtgatatatcagcgatctttagggaagctgtgtcgcgtcatggatcaacacacgtggagagccccaggaagtgctgcccaattcagctcttacaattatata

SEQ ID NO: 74693 - DNA, 110 bp, synthetic construct
  source 1..110: mol_type = other DNA
acacacgtggagagccccaggaagtgctgcccaattcagctcttacaattatatacccttcagaaaaacaatctttcttcctaaactgtctatgtgtttagtatagattt

SEQ ID NO: 74694 - DNA, 110 bp, synthetic construct
  source 1..110: mol_type = other DNA
gtacctgattctgatggactctgccttgcaacagataaagcctggggtccctgggcaccaggtgtctggcacatccagtccccacctcagcaacgagactggagtcagag

SEQ ID NO: 74695 - DNA, 110 bp, synthetic construct
  source 1..110: mol_type = other DNA
agtaggagcttagactctagttggggaaagaaggtggatatacttgaaatacttacagagcttgcctcgtcccaggaatgagcctgggtctgctctacgtactctctctt

SEQ ID NO: 74696 - DNA, 110 bp, synthetic construct
  source 1..110: mol_type = other DNA
cagagcttgcctcgtcccaggaatgagcctgggtctgctctacgtactctctcttttcatcctgctggtgctcttatccccattctgcagtctaggaaactgaggtttgg

SEQ ID NO: 74697 - DNA, 110 bp, synthetic construct
  source 1..110: mol_type = other DNA
agcaggaaagagatggcccctctagtgctcaggaggagcttagggacaaaagaaaggaagcataaggggcatgactccactgctcgagttccaactccacccttggtgtg

SEQ ID NO: 74698 - DNA, 110 bp, synthetic construct
  source 1..110: mol_type = other DNA
tacagatcgaaaaaaaatggaggtatatcacccaaagtcatgtagtgaataagcgacagaacctgcatttaataccagagcttaagcagttaaccgtcatgtgagacaga

SEQ ID NO: 74699 - DNA, 110 bp, synthetic construct
  source 1..110: mol_type = other DNA
gtgcctacttcatgcgtcactcatttacttgtctgtgcatcatatagattgaagtgttcaataataatactgctagtaacaaggatgtactatgctgggttctactttat

SEQ ID NO: 74700 - DNA, 110 bp, synthetic construct
  source 1..110: mol_type = other DNA
aactcagaatctctctgaatctccttgtccaagagtgtttataaaccaatctcagagttccccttgtggttcagagctaatgaacccgactagtatccatgaggatgtgc

SEQ ID NO: 74701 - DNA, 110 bp, synthetic construct
  source 1..110: mol_type = other DNA
actaatcaatcacagtgctctttccattgtattgtaaagaggcattagaatccttccccacacagctcttgaccagcactgtcaatctaagatgacatgtgattgtaagg

SEQ ID NO: 74702 - DNA, 110 bp, synthetic construct
  source 1..110: mol_type = other DNA
ccagcgctgagttaggagttgaacaatttaaaattgccagataaaaacgaaaagtatcagcaaacgctagtcacatttataatttttcatatatctctatagcaatcttt

SEQ ID NO: 74703 - DNA, 110 bp, synthetic construct
  source 1..110: mol_type = other DNA
aaaaacaggagttcctttcatgtctcagtgggtcaggaactcgatagagtgtccgcaaagatgcaagtatgatacctgacctcactcagtgggttaagaatccagcgttg

SEQ ID NO: 74704 - DNA, 110 bp, synthetic construct
  source 1..110: mol_type = other DNA
atgccaagtgcagcagggtcaggagccactgcctggccctgagcatttgatggtggacaacatgaggttcttgtggatttttaatgctaaaaagcctctataggagttcc

SEQ ID NO: 74705 - DNA, 110 bp, synthetic construct
  source 1..110: mol_type = other DNA
caggctctttacgaggttctccacacgtgttatttcatttaataagcaaaatagccctgtgagggatgtatgaggcttatcctcactttacagatgaggaagctggtgtt

SEQ ID NO: 74706 - DNA, 110 bp, synthetic construct
  source 1..110: mol_type = other DNA
cctgtgagggatgtatgaggcttatcctcactttacagatgaggaagctggtgttcagaaggtttttaaaaaaccttgtccaacatggcacagttaaaagtgaaagatcc

SEQ ID NO: 74707 - DNA, 110 bp, synthetic construct
  source 1..110: mol_type = other DNA
gctgggagaagatgaggtgaacactgcctggggctgaagaggggagggatccatcccctcctgagaaagctaattgttcccgtagctcccaagataaagccacaaaacag

SEQ ID NO: 74708 - DNA, 110 bp, synthetic construct
  source 1..110: mol_type = other DNA
ccctcctgagaaagctaattgttcccgtagctcccaagataaagccacaaaacagctgtgatggtggcacaggatggtgcctctggatgtgctttaaaaaggactatata

SEQ ID NO: 74709 - DNA, 110 bp, synthetic construct
  source 1..110: mol_type = other DNA
agctctaaaaaggcaaaaaaaaaaaaaaaaaaaaaaggcaccacagaatttaggggtacccaacctgatttggcagcaaaactttttattcaatttccctgatctggaga

SEQ ID NO: 74710 - DNA, 110 bp, synthetic construct
  source 1..110: mol_type = other DNA
ctgcagtaaaaggaaccagggctcctttgcgaagtagccaattctagggctggtatctagataacacctgcagagctagaaagccagtctatggtcatcatgtgcctcat

SEQ ID NO: 74711 - DNA, 110 bp, synthetic construct
  source 1..110: mol_type = other DNA
aaggcaattagcatgatcatgtgtgaagtaagagaaagcaactgatactgagagcttaagaggtctcagatgaaaagacgacaaatataaaccctcacctctctttcctg

SEQ ID NO: 74712 - DNA, 110 bp, synthetic construct
  source 1..110: mol_type = other DNA
ttaagaggtctcagatgaaaagacgacaaatataaaccctcacctctctttcctgcaaaggccatgagtagcaatctttctgcaaactttctgatttaattcagaactaa

SEQ ID NO: 74713 - DNA, 110 bp, synthetic construct
  source 1..110: mol_type = other DNA
actaaagagtattttcgaaaccaaccaatattctagcctactgagatcatttacaattttgaatttaagtttcatttccctcgggaaaaccaaatagtgttacttttttt

SEQ ID NO: 74714 - DNA, 110 bp, synthetic construct
  source 1..110: mol_type = other DNA
aagtaccccagtttggacaatgaagggtctatagagagagcaaagctgcagtccagtccactctggtcaagcatttggggccaaggtctgtatcttcctgaggctcagcc

SEQ ID NO: 74715 - DNA, 110 bp, synthetic construct
  source 1..110: mol_type = other DNA
gtccactctggtcaagcatttggggccaaggtctgtatcttcctgaggctcagccagaggggataatgcaatacctctcctgccagggccacctcaaggaccagggaggt

SEQ ID NO: 74716 - DNA, 110 bp, synthetic construct
  source 1..110: mol_type = other DNA
gtttcagccattcactttcccggaattctaactgaggtaccaagctggaagatacccaaagacacagaccgagcttcccaaagagttctcctctaaaatgtacactgcag

SEQ ID NO: 74717 - DNA, 110 bp, synthetic construct
  source 1..110: mol_type = other DNA
tttcatgccattctgtgcactatcaccttttaggctttcatcagccctgtaacgtataggtacttttatctctgtgtacacacaccgagggacagcgaggtaaaatgacc

SEQ ID NO: 74718 - DNA, 110 bp, synthetic construct
  source 1..110: mol_type = other DNA
agaaggcacattttaagaaatggctggtcccaggagcccataaagacgtgatgagcagagctgaacccaaccacagcctggagccaggccagctgaccacatacctgtga

SEQ ID NO: 74719 - DNA, 110 bp, synthetic construct
  source 1..110: mol_type = other DNA
cagagctgaacccaaccacagcctggagccaggccagctgaccacatacctgtgagcgagagcaacacatgcttacctggacaacactatgctgagtcaggtaagccaga

SEQ ID NO: 74720 - DNA, 110 bp, synthetic construct
  source 1..110: mol_type = other DNA
gctggcacttcaattttctcccacctgagtgccccttttaaagagagggggagggcaacagggagacacacgtcaacatgaactgtcatttaatacagctccttggtgat

SEQ ID NO: 74721 - DNA, 110 bp, synthetic construct
  source 1..110: mol_type = other DNA
caacagggagacacacgtcaacatgaactgtcatttaatacagctccttggtgatgacgctggggagaaggatgaggggaatccagtccggtggttgaaagacaatacga

SEQ ID NO: 74722 - DNA, 110 bp, synthetic construct
  source 1..110: mol_type = other DNA
ataattagagagccccaagggattcagcacagctggaaatcagctacccagtgttagaagccagccagcccctctctggccccctcctgggatgtgactccaggaactgc

SEQ ID NO: 74723 - DNA, 110 bp, synthetic construct
  source 1..110: mol_type = other DNA
tgctcaggccaggaaaattctttcttctctaatgcgaggcagatgccatttacctaacggatgtggggagagaggcactatcgttggtttcctggattctgttctgtgtg

SEQ ID NO: 74724 - DNA, 110 bp, synthetic construct
  source 1..110: mol_type = other DNA
aacggatgtggggagagaggcactatcgttggtttcctggattctgttctgtgtgcaacgttgctgggggcctctggccatcctgccatctcaggaggctctcggttaaa

SEQ ID NO: 74725 - DNA, 110 bp, synthetic construct
  source 1..110: mol_type = other DNA
cacctatgtctgtcccccatctgttacctgagtgtttgtttgttttttttgaaccaggccaagtctcaggagctggaaaatggaaccattgtgatattgtcacaaagtac

SEQ ID NO: 74726 - DNA, 110 bp, synthetic construct
  source 1..110: mol_type = other DNA
tttgttctctctttgcgttttggtagctctgtcttgttagggccctttaccatttctggtaccatctggctgtcctgtcctcatctgtatgtacacacatgtggtgttgt

SEQ ID NO: 74727 - DNA, 110 bp, synthetic construct
  source 1..110: mol_type = other DNA
aggggtgagggaatctgcacttagaatcaactctgttgtttagattggtgtttaaaggccaccattatgggacttctcgatttccctttttagaatgagaatctctacca

SEQ ID NO: 74728 - DNA, 110 bp, synthetic construct
  source 1..110: mol_type = other DNA
aggccaccattatgggacttctcgatttccctttttagaatgagaatctctaccatttggaataagggtgttttgtggcttaagacctagaggtgacaacatttggtttc

SEQ ID NO: 74729 - DNA, 110 bp, synthetic construct; identical to SEQ ID NO: 74727
  source 1..110: mol_type = other DNA

SEQ ID NO: 74730 - DNA, 110 bp, synthetic construct; identical to SEQ ID NO: 74728
  source 1..110: mol_type = other DNA

SEQ ID NO: 74731 - DNA, 110 bp, synthetic construct
  source 1..110: mol_type = other DNA
ttctcaccccccaaagaacacttgttagaagctacagggagtctatgcaactggaaaacaggcaatatctcagcatggggtagagatgacatcacattttgtgccttggg

SEQ ID NO: 74732 - DNA, 110 bp, synthetic construct
  source 1..110: mol_type = other DNA
tgcatgaataccacagaagcccctttagtgggagtcataggactttggggcaggcaactttctaagacttttaatcagccttgctgagctttcttagaactgcattgttg

SEQ ID NO: 74733 - DNA, 110 bp, synthetic construct
  source 1..110: mol_type = other DNA
aactttctaagacttttaatcagccttgctgagctttcttagaactgcattgttgtcttaggctcttcctcccaagcaaactttcttccttccctctttccttcaaaggg

SEQ ID NO: 74734 - DNA, 110 bp, synthetic construct
  source 1..110: mol_type = other DNA
gtcattgctgatgagactgtccaggaaaggatgaactcaagggactgtacgtggtctgggtacctctggagtagctattgtgaaccgcatgaaaaagataagctttctat

SEQ ID NO: 74735 - DNA, 110 bp, synthetic construct
  source 1..110: mol_type = other DNA
ggttgtattgtaaagatacaacaggacagtatgaaaaatctgttgatcattcagaaaacagcattagctctagtcatccactgtacacagcaaaagcgctagccactcca

SEQ ID NO: 74736 - DNA, 110 bp, synthetic construct
  source 1..110: mol_type = other DNA
aaacagcattagctctagtcatccactgtacacagcaaaagcgctagccactccatcatgtgatcggcctctcagcagcaggcacccagtttgaatgctctgtgaatatg

SEQ ID NO: 74737 - DNA, 110 bp, synthetic construct
  source 1..110: mol_type = other DNA
tcatccagggtgaaaatagtttttgacctgagggaactcccatctgataaagggaaatagaaccacttccccgggctaccctcacttgcatcatccccaaatcaaggaaa

SEQ ID NO: 74738 - DNA, 110 bp, synthetic construct
  source 1..110: mol_type = other DNA
catatgcctgggtcaaaattgtatccctacagaaagctttaccccaaaggatttgccaggtgctgccagagtgtcagtgtctcgggccaacattttggataattgcccag

SEQ ID NO: 74739 - DNA, 110 bp, synthetic construct
  source 1..110: mol_type = other DNA
ccaggtgctgccagagtgtcagtgtctcgggccaacattttggataattgcccagcttggggtttcctagaccatgtaggcagaataaataccaactccagacctcatca

SEQ ID NO: 74740 - DNA, 110 bp, synthetic construct
  source 1..110: mol_type = other DNA
aaggtgaggactcacacattctcacagagaacatccagctctcaaggagcagcaaacacacacagttgacccctgcatcccccagcaccaagacttcaggacccactgct

SEQ ID NO: 74741 - DNA, 110 bp, synthetic construct
  source 1..110: mol_type = other DNA
acacacacagttgacccctgcatcccccagcaccaagacttcaggacccactgctcattcctgtgtctaactaccaaaaaagtaaggaaggcattttaggaaaagtcttc

SEQ ID NO: 74742 - DNA, 110 bp, synthetic construct
  source 1..110: mol_type = other DNA
ctatggacttcaaatacgttatccttcaatggattggatctaagtggtgaccaacaaatataattcagtctgtgcagctgcccacgtgtctacatctgaccatttgagga

SEQ ID NO: 74743 - DNA, 110 bp, synthetic construct
  source 1..110: mol_type = other DNA
aagttggttacaaatactcagttggacacctgagcaaatgagatgtaagctcacggggttcataaatctcttagttataaatgctgaaaaataaagtgaaccacagtttt

SEQ ID NO: 74744 - DNA, 110 bp, synthetic construct
  source 1..110: mol_type = other DNA
atggaacttgcccaagggaaagccagctagttcctaagacttaaacacaagtgcttcaccctctaaattctaatacttataaatactgtctacagtagggcttcattatt

SEQ ID NO: 74745 - DNA, 110 bp, synthetic construct
  source 1..110: mol_type = other DNA
attccctcaaaccataactagctcattagatgagggagagaaatgaagaaattggttgttgagggaagtgtttctcacctttgacactggtttagttcgtaactatccac

SEQ ID NO: 74746 - DNA, 110 bp, synthetic construct
  source 1..110: mol_type = other DNA
gagccagggcagggatccatcccatatcctcacaaacaatgctgcatccttaactgctgagtcacaatgggaattctgtaaaattctgtttttactctgcatactggcta

SEQ ID NO: 74747 - DNA, 110 bp, synthetic construct
  source 1..110: mol_type = other DNA
tacatctatgaggtaaaacacctatgatgagatatctttgaatgtattttaaactatgataacctgagaaccgggtcactgtcttatgctaaggcaagggatatcttcag

SEQ ID NO: 74748 - DNA, 110 bp, synthetic construct
  source 1..110: mol_type = other DNA
aagagagcttcagtgtcacccctcagacctcctccttggtacttgcttgtctgcctttttctcaacttgacatgacagcatcctaaccgtattttcaaattttccagatt

SEQ ID NO: 74749 - DNA, 110 bp, synthetic construct
  source 1..110: mol_type = other DNA
cttctagatcatgacagaggctcctaagtcaaggaaaaaattctagtgaagttgtattcccgcttttagatattaggcatatgtaaaaatctaaatttacaagaccatca

SEQ ID NO: 74750 - DNA, 110 bp, synthetic construct
  source 1..110: mol_type = other DNA
agcttcagtgtggtaggcctgatgttcaatgagcctgaggaggcttctgtccatgaggctagaaattccatctgtcgtcttttcactgtatctccagccccatcctatat

SEQ ID NO: 74751 - DNA, 110 bp, synthetic construct
  source 1..110: mol_type = other DNA
gctaggggtggaatcagagatacagctgtgggcctatgccagagccatagcaacatgggctctgagatgcacctacgacctatagcttgtgggaagttgcagcttgtggc

SEQ ID NO: 74752 - DNA, 110 bp, synthetic construct
  source 1..110: mol_type = other DNA
ctgtgggcctatgccagagccatagcaacatgggctctgagatgcacctacgacctatagcttgtgggaagttgcagcttgtggcaacaacagatccttaacctactgag

SEQ ID NO: 74753 - DNA, 110 bp, synthetic construct
  source 1..110: mol_type = other DNA
ttaaaagagtggttaagttaaattgtggcttttagggcagtcctaatccaatccgactggtgtccttatgggaagaggaaagctggacacaccaaggaacatgagggatg

SEQ ID NO: 74754 - DNA, 110 bp, synthetic construct
  source 1..110: mol_type = other DNA
attgagagcccatacggatcaaaagctactatgtagaccaactttcctcctacccatacctcatcatagtctatatatgacaaccttaataattatgatgctactactgc

SEQ ID NO: 74755 - DNA, 110 bp, synthetic construct
  source 1..110: mol_type = other DNA
aaaaaaaaaaaaggtaatggaatcagaacaaagacatcaaaggggagctacagtagctttgcaatgtgctaagttggctggctgatcaacatttccccaaattccttttc

SEQ ID NO: 74756 - DNA, 110 bp, synthetic construct
  source 1..110: mol_type = other DNA
tacacaactcagtatatagttgtactcccaggtaagatatattccagtgaaaggaatacaaagcaaaatcaacaaaggtaaggctccataggacaaagtctgaaggaaaa

SEQ ID NO: 74757 - DNA, 110 bp, synthetic construct
  source 1..110: mol_type = other DNA
atacaaagcaaaatcaacaaaggtaaggctccataggacaaagtctgaaggaaaacgaatgcaagcttgcaagggcctgtcccagtgcattcacacaggacagggttaat

SEQ ID NO: 74758 - DNA, 110 bp, synthetic construct
  source 1..110: mol_type = other DNA
aattctcactggcagggtggcatcaaggatagagaaagaatgcactctggaatgttctctatggggtccaaagcaccacacaaaagggaaccaaaaaagcgacaagctgc

SEQ ID NO: 74759 - DNA, 110 bp, synthetic construct
  source 1..110: mol_type = other DNA
ctgcttcctgactttattccttcctttcatcatctccatctgtttctgtctttgagaatttcattttggtctttaagtctgattgatgtctcctctaacatttcacattc

SEQ ID NO: 74760 - DNA, 110 bp, synthetic construct
  source 1..110: mol_type = other DNA
gaatttcattttggtctttaagtctgattgatgtctcctctaacatttcacattcattagcatttcttaccagatttcacactttcagtcagccatttttacatatctaa

SEQ ID NO: 74761 - DNA, 110 bp, synthetic construct
  source 1..110: mol_type = other DNA
tagatgggttgatggttttagctattaaaatgccaacaaattcactgttacttgtttgtctttgggcaagaatctgggtatgggtggacttacccgtgtgaaaacatttg

SEQ ID NO: 74762 - DNA, 110 bp, synthetic construct
  source 1..110: mol_type = other DNA
tgattattaaaactgggataataagatgttagaagaagcagtataaatataaggcagtgaaatgaagagagtagcagacagagggaaggccattaagggctgactgtgta

SEQ ID NO: 74763 - DNA, 110 bp, synthetic construct
  source 1..110: mol_type = other DNA
gcatgcaggcagattctgaagggaagttgatgttggcaagaagggatcatcataatgctttttccattctaatgtgttcttttgttttgttttatagctgcacctgtggc

SEQ ID NO: 74764 - DNA, 110 bp, synthetic construct
  source 1..110: mol_type = other DNA
ctcagcctattgcctgcctcaaaaaatatttttaaatgaatgaataaatgacactgggtaagttacttgactgtgagccttatgctctcaactatatgatgagggtatta

SEQ ID NO: 74765 - DNA, 110 bp, synthetic construct
  source 1..110: mol_type = other DNA
tacctttagggttgttctgggaattaagtaagaatgcatttaaaatatttagatggcacctgactcatagtaaacacttaatgagtggtagatattgttttctttttcac

SEQ ID NO: 74766 - DNA, 110 bp, synthetic construct
  source 1..110: mol_type = other DNA
ggagagtctgctattgtgaaaggtaggagggcttcctggaggaagggatttcccagggctaaggttggaaagacatgcaggagttggctgggtgaggaggggccagaaca

SEQ ID NO: 74767 - DNA, 110 bp, synthetic construct
  source 1..110: mol_type = other DNA
gggctaaggttggaaagacatgcaggagttggctgggtgaggaggggccagaacagctttctagagaggcagagaggctgggcctagggacattcctgggaggaggggga

SEQ ID NO: 74768 - DNA, 110 bp, synthetic construct
  source 1..110: mol_type = other DNA
agcctgaaaagcaaataaacaactcattaggtccatatagtgtttttctgggacaaagaaactgactttgaaaggaggggaatggtttggagactgatagtgtacaaatt

SEQ ID NO: 74769 - DNA, 110 bp, synthetic construct
  source 1..110: mol_type = other DNA
gtgtacctatttatcccatcgtggggaaggagtgttggtgagactgacaatgggcagaggtgactgagctggtggtcagagctgttgggtagaagctgcatggagttgta

SEQ ID NO: 74770 - DNA, 110 bp, synthetic construct
  source 1..110: mol_type = other DNA
agaggtgactgagctggtggtcagagctgttgggtagaagctgcatggagttgtattaggtgaggtccactcagtccccaaaagctgtgctccatccttggcaggcagtt

SEQ ID NO: 74771 - DNA, 110 bp, synthetic construct; identical to SEQ ID NO: 74769
  source 1..110: mol_type = other DNA

SEQ ID NO: 74772 - DNA, 110 bp, synthetic construct; identical to SEQ ID NO: 74770
  source 1..110: mol_type = other DNA

SEQ ID NO: 74773 - DNA, 110 bp, synthetic construct
  source 1..110: mol_type = other DNA
agatgatctcaaatgaaatgtctgatatttattgtttcgcttcatgcttaatgaaagtaaaagcagctatcatatacataggtactattgacttaacacagtgtttggtt

SEQ ID NO: 74774 - DNA, 110 bp, synthetic construct
  source 1..110: mol_type = other DNA
agtaaaagcagctatcatatacataggtactattgacttaacacagtgtttggttgggtacataaccattttcctggccccatttgaatgttttacatttgcagatatca

SEQ ID NO: 74775 - DNA, 110 bp, synthetic construct
  source 1..110: mol_type = other DNA
ttgcctcacaggggtagctaagaactggaaaccccaccattttctttaaaaattattatggggaaaaagttaacatgagggtttgaataaggtgcatttctgaagcatca

SEQ ID NO: 74776 - DNA, 110 bp, synthetic construct
  source 1..110: mol_type = other DNA
atggaatgcttactatctatggaattatctagaatacaaaatgaaaggaactttgccagagtgcagactaataaaactagtgtatttgcacatatttggcatagagacta

SEQ ID NO: 74777 - DNA, 110 bp, synthetic construct
  source 1..110: mol_type = other DNA
ccagagtgcagactaataaaactagtgtatttgcacatatttggcatagagactatgagccgtaaatatggtagttgttaactttaatttgacagctgcctattgtccat

SEQ ID NO: 74778 - DNA, 110 bp, synthetic construct
  source 1..110: mol_type = other DNA
aaatgcatatattggaaataattctatttagagtcttcttttttttgtgtgtgggggggcatctagcttctttcattcaatgttatggttacaagattcatgttatttca

SEQ ID NO: 74779 - DNA, 110 bp, synthetic construct
  source 1..110: mol_type = other DNA
aacattaaaccaagtctaaggctcttatgagcctggggtcttatgtgaccacacaggttgcacccccttgaaacagacagctcaagctccgtcctctgtgactcctcgcc

SEQ ID NO: 74780 - DNA, 110 bp, synthetic construct
  source 1..110: mol_type = other DNA
agatcattacagaatgcctctatttctccctgtctttgagcacttttaaatcccccgtctattaccccgcagcaacagcaatgagaagcatcatcttccttgtcagaagt

SEQ ID NO: 74781 - DNA, 110 bp, synthetic construct
  source 1..110: mol_type = other DNA
gtggcagtgtaagcaagggaacttacatagaaggcttgtcttgcatgaccacaagatgagcagatctctgtaccagtcttcccgaatcttaaaatctcatatagaggcct

SEQ ID NO: 74782 - DNA, 110 bp, synthetic construct
  source 1..110: mol_type = other DNA
atgagcagatctctgtaccagtcttcccgaatcttaaaatctcatatagaggccttaacaaggttcaggcaggtatacaatccagagggtctcaacaacacattattccc

SEQ ID NO: 74783 - DNA, 110 bp, synthetic construct
  source 1..110: mol_type = other DNA
atacataaaatgtaaagatgtttatgggatatcccctgcttaaaatcctgtattacctatgcttcctagcagagtagatagaaataatcaagcattggttgaatgaatga

SEQ ID NO: 74784 - DNA, 110 bp, synthetic construct
  source 1..110: mol_type = other DNA
cctatgcttcctagcagagtagatagaaataatcaagcattggttgaatgaatgaatttattctctaccctatccaggctcattttttactttccttcaaagagcgggac

SEQ ID NO: 74785 - DNA, 110 bp, synthetic construct
  source 1..110: mol_type = other DNA
ggaaagtaagtgattcacagagacttacctataggagtgagagttgagccccacatcaaactcacacatgtggggatctggcgctgggaaaaagagctcccagagcatct

SEQ ID NO: 74786 - DNA, 110 bp, synthetic construct; identical to SEQ ID NO: 74785
  source 1..110: mol_type = other DNA

SEQ ID NO: 74787 - DNA, 110 bp, synthetic construct
  source 1..110: mol_type = other DNA
agttatttctccgaacctagcgtaagtcatagtttatgctgaaatcaaggcatggaatttctgaggcacatagctaggttcaagctaaagtataccattcagagtcactt

SEQ ID NO: 74788 - DNA, 110 bp, synthetic construct
  source 1..110: mol_type = other DNA
aatttctgaggcacatagctaggttcaagctaaagtataccattcagagtcactttgaggagggacctaactcttgtttctaagcgcaaattatgaaaacttctactgta

SEQ ID NO: 74789 - DNA, 110 bp, synthetic construct; identical to SEQ ID NO: 74787
  source 1..110: mol_type = other DNA

SEQ ID NO: 74790 - DNA, 110 bp, synthetic construct; identical to SEQ ID NO: 74788
  source 1..110: mol_type = other DNA

SEQ ID NO: 74791 - DNA, 110 bp, synthetic construct
  source 1..110: mol_type = other DNA
tcatcaagatggttacgttggtctggtccagatgtaatctaatctcactaatgcatttgtggtcagttcacctgctgggtcagctggggactggctggtctgggatagtc

SEQ ID NO: 74792 - DNA, 110 bp, synthetic construct
  source 1..110: mol_type = other DNA
gggttattcagttgtaaatatcaacacacatttatctcttactcacattactccttagctgagaaactgtgctcactggaattactcatgaggctagacagagcaactac

SEQ ID NO: 74793 - DNA, 110 bp, synthetic construct
  source 1..110: mol_type = other DNA
catgagggctcaccttcacgaatgcaattaatgcctttttaaatgagaccataaagagctccctcactccttccatgtgaagagccataaagttgtaagttcgcagtctg

SEQ ID NO: 74794 - DNA, 110 bp, synthetic construct
  source 1..110: mol_type = other DNA
gagctccctcactccttccatgtgaagagccataaagttgtaagttcgcagtctggaagagggcactcacccaaactcaaccatgcgggtatcctgatctaagacttcca

SEQ ID NO: 74795 - DNA, 110 bp, synthetic construct
  source 1..110: mol_type = other DNA
gaaggcaaaaattaagattttttcatgatctcatgaaaaggatttcttctttgtaatgctgattgtttagctatacaacaaagcaattctcctctttctggaaaaatagt

SEQ ID NO: 74796 - DNA, 110 bp, synthetic construct
  source 1..110: mol_type = other DNA
tccaccctgaactcctttcagggagtattgaaggtcagccactgtggtagctagtgacttcattcttgtagtgccagctggtgagtgacaatttttagttggcaccaggc

SEQ ID NO: 74797 - DNA, 110 bp, synthetic construct
  source 1..110: mol_type = other DNA
tagctgtgcctctatgttttgactacattgctcttctgcctggaatgcccttgtcttcataattcccagctcccttacaaggggccaacacctttaatcttttgaggtta

SEQ ID NO: 74798 - DNA, 110 bp, synthetic construct
  source 1..110: mol_type = other DNA
ggatcccaaggaaagatcttgtgcaattaaattgtaagcttctggattagctgctttactcatggaacacaagttttacttgaaagaacaactaataggtatatcataat

SEQ ID NO: 74799 - DNA, 110 bp, synthetic construct
  source 1..110: mol_type = other DNA
aattatgaaactacaaaaagggcagttaagctgcttccttgaaacaagtttaacttccaatatggggtcacaaaagtgactctagcctgaacctaacccttaaaacaccc

SEQ ID NO: 74800 - DNA, 110 bp, synthetic construct
  source 1..110: mol_type = other DNA
gctgtgccaacaccagatccttaccctactgtgcagggctcgaacctgcaagccattactcccaaaaagctgccaatccccgttgcgtcacagtgggaactcttcctagt

SEQ ID NO: 74801 - DNA, 110 bp, synthetic construct
  source 1..110: mol_type = other DNA
ttactcccaaaaagctgccaatccccgttgcgtcacagtgggaactcttcctagtagctcctttttaattcaagtaggggagggacccactgtcctcattttaaaaatta

SEQ ID NO: 74802 - DNA, 110 bp, synthetic construct
  source 1..110: mol_type = other DNA
gcccttgtactaagttcaaactcctttccctgatacctgggatcctccatagccctctctcttattctctctctctctctcacacacacacatgatcaatccaatcttac

SEQ ID NO: 74803 - DNA, 110 bp, synthetic construct
  source 1..110: mol_type = other DNA
cagatggagccaagtgtattgctactcgactgccgtattagctattttctaaacatgtaacaattagctgggcatgaaaataatcatgaacaactttatttaattattta

SEQ ID NO: 74804 - DNA, 110 bp, synthetic construct
  source 1..110: mol_type = other DNA
gtttatagggctgtggccttgtcttaattgctactacctacaagtgaattttaagttccccattcagatcaagagatcatttcgcttgtcctagagctgctccaccccaa

SEQ ID NO: 74805 - DNA, 110 bp, synthetic construct
  source 1..110: mol_type = other DNA
ttccccattcagatcaagagatcatttcgcttgtcctagagctgctccaccccaaactgactgccaagtgtacatgcatgcatactcacatgtgattttatgtgtttgtt

SEQ ID NO: 74806 - DNA, 110 bp, synthetic construct; identical to SEQ ID NO: 74804
  source 1..110: mol_type = other DNA

SEQ ID NO: 74807 - DNA, 110 bp, synthetic construct; identical to SEQ ID NO: 74805
  source 1..110: mol_type = other DNA

SEQ ID NO: 74808 - DNA, 110 bp, synthetic construct
  source 1..110: mol_type = other DNA
ggtagatactcaattaatgcttattccttccatttttatctttaggatagagcttgaattaaaacctggatatcttaaaatgctggctagtgctcttttcccgtagatta

SEQ ID NO: 74809 - DNA, 110 bp, synthetic construct
  source 1..110: mol_type = other DNA
aggttgctccatcctcagggccccactgatgtctgtggtaagtcatgctttttctccctgggaccaggcagagtgttgctagtgctccttcctcttgcaaaacccagaag

SEQ ID NO: 74810 - DNA, 110 bp, synthetic construct
  source 1..110: mol_type = other DNA
ccctgggaccaggcagagtgttgctagtgctccttcctcttgcaaaacccagaagcttaccaatcaccaagtgccctgacagttaccgtagcctcctacttccgcaaaat

SEQ ID NO: 74811 - DNA, 110 bp, synthetic construct; identical to SEQ ID NO: 74809
  source 1..110: mol_type = other DNA

SEQ ID NO: 74812 - DNA, 110 bp, synthetic construct; identical to SEQ ID NO: 74810
  source 1..110: mol_type = other DNA

SEQ ID NO: 74813 - DNA, 110 bp, synthetic construct
  source 1..110: mol_type = other DNA
tgatagcatagtacctgtcatataataggtgctcagcatatatttatcaggtggtgaatgagtaaatgaaggtgatatcttcgttactatgagggaagtcagttgtcatt

SEQ ID NO: 74814 - DNA, 110 bp, synthetic construct
  source 1..110: mol_type = other DNA
gaatgagtaaatgaaggtgatatcttcgttactatgagggaagtcagttgtcattaatgtatagtgaatagtcagctcaaatgtttgttatatgttatatttgtgagcac

SEQ ID NO: 74815 - DNA, 110 bp, synthetic construct
  source 1..110: mol_type = other DNA
tacaactgtataatagagttcattgaccattctattgaaacagaataagaggattaaagatgtgtaactatatctaaagttatacaattcagatcagttataccagggct

SEQ ID NO: 74816 - DNA, 110 bp, synthetic construct
  source 1..110: mol_type = other DNA
agacagagttcatttgatattgtttgagcccctggatagccatgcatagttttatttttttaaatataagacatttatattatttctgtctgtcacttgcagtgggaaga

SEQ ID NO: 74817 - DNA, 110 bp, synthetic construct
  source 1..110: mol_type = other DNA
ctttgagatgttttgtgcaagcttcaatggtaatcccaaagcaaaaatctagagtaaattcatgaaatataaaaaagggaggaatttccattgtggcacagcagaaatga

SEQ ID NO: 74818 - DNA, 110 bp, synthetic construct
  source 1..110: mol_type = other DNA
accaagtattcttttcccacagcagtggtataaagctagaaatcaatttcaggaagaaaaatggggaaaaaaaaaaaaaaaaaccaaagatgtgcagactaaacaacatg

SEQ ID NO: 74819 - DNA, 110 bp, synthetic construct
  source 1..110: mol_type = other DNA
gactgcaggcaaataccagatgctagaggaggcaaggaaggatcctcccccttaagaagtcctgccaacagcttgattccagacctctagtctctagaactgaggtaagt

SEQ ID NO: 74820 - DNA, 110 bp, synthetic construct
  source 1..110: mol_type = other DNA
gtacccctcttcccatggtcatgagaaacaaattagcagcaatctcatcctgccactctgtcttacactcaggcccatgcacgttatagctctctcctgctttatcatcc

SEQ ID NO: 74821 - DNA, 110 bp, synthetic construct
  source 1..110: mol_type = other DNA
ctctgtcttacactcaggcccatgcacgttatagctctctcctgctttatcatccttatgcctttcattttaaaattatataaaaactcagatgagagcttgtttggagg

SEQ ID NO: 74822 - DNA, 110 bp, synthetic construct
  source 1..110: mol_type = other DNA
agttagaacattaattaattaacattttgcttttgctatataataaggcccacttgtccagctatcacatttgggccaaactcaaggatatgagcatgagaccaaataga

SEQ ID NO: 74823 - DNA, 110 bp, synthetic construct; identical to SEQ ID NO: 74822
  source 1..110: mol_type = other DNA

SEQ ID NO: 74824 - DNA, 110 bp, synthetic construct
  source 1..110: mol_type = other DNA
tattgatataaacttgccttgtgttacagacacatcctcctgttgggctgctcgccagcaggcctgtgagacttgtacgtgtccagctacaaggctgaataaagagcttg

SEQ ID NO: 74825 - DNA, 110 bp, synthetic construct
  source 1..110: mol_type = other DNA
cacaaaagggtcaatgttatgttcaaaagcgtaacgattgttttcagtaagcttaataataaaatacattgtctttatcccccaatgggtgcaaatatcctcagactact

SEQ ID NO: 74826 - DNA, 110 bp, synthetic construct
  source 1..110: mol_type = other DNA
tcgcatgaacaatttaaagaaataacaaggagggtgaaaggtcaacagctaccaatctaggcagttataaaacaaatgcaaactctctggcttggagagactctggttct

SEQ ID NO: 74827 - DNA, 110 bp, synthetic construct
  source 1..110: mol_type = other DNA
ttttctttcttgggctattaagcacaatgtgcagttaatatctatttcacctccggcaatacctaagacatgatttctcattataaagaacactagtgctaaccagttta

SEQ ID NO: 74828 - DNA, 110 bp, synthetic construct
  source 1..110: mol_type = other DNA
ccttaaggacgtttctggggccaaggcaaactggatattaaacacttttgttttgttttgtttttggcagaggttccaaatactctcacaggatatttgttcagaacccg

SEQ ID NO: 74829 - DNA, 110 bp, synthetic construct
  source 1..110: mol_type = other DNA
ttttgtttttggcagaggttccaaatactctcacaggatatttgttcagaacccggtgggacactgtattctgccaccttagcccaccctccagctccaggcttagtgta

SEQ ID NO: 74830 - DNA, 110 bp, synthetic construct
  source 1..110: mol_type = other DNA
gaatgtttaacagaacataaacaacctggcccagacagacaggtctggagaaggctactcatgctaacatttgcaaagcttcctcctagttactaattattgacctttat

SEQ ID NO: 74831 - DNA, 110 bp, synthetic construct
  source 1..110: mol_type = other DNA
tttaccatctgccgtctttaacagatagcagggctccagagactaggccatagaatgtggaaatgtcgagaggaagaggagcacagtgttctttctgagacactactgct

SEQ ID NO: 74832 - DNA, 110 bp, synthetic construct
  source 1..110: mol_type = other DNA
gcagagctgagatatgaacacagagctgagatatcaacattgcacaacataaggctaccacaatagtagaaaagtcaagcacaaatcaactgctgactaaacatagcggt

SEQ ID NO: 74833 - DNA, 110 bp, synthetic construct
  source 1..110: mol_type = other DNA
acccagatgttggaaagccaggatgctcaggtaaaccagacagttgctgaaggaagcagctatccctcctagggctggaatccaaaagagaagaactagagcttggagga

SEQ ID NO: 74834 - DNA, 110 bp, synthetic construct
  source 1..110: mol_type = other DNA
gcagctatccctcctagggctggaatccaaaagagaagaactagagcttggaggaagtcccatcctcaactcaggggtacatggttggttctttgagttctggtcggaac

SEQ ID NO: 74835 - DNA, 110 bp, synthetic construct; identical to SEQ ID NO: 74833
  source 1..110: mol_type = other DNA

SEQ ID NO: 74836 - DNA, 110 bp, synthetic construct; identical to SEQ ID NO: 74834
  source 1..110: mol_type = other DNA

SEQ ID NO: 74837 - DNA, 110 bp, synthetic construct
  source 1..110: mol_type = other DNA
agtagttgcctgtgatggtccataattgagaacccaaggttcccaagtaaatattgcatatagagtagaatatacttaggaaaatcatgagctgaaatactaggttaagg

SEQ ID NO: 74838 - DNA, 110 bp, synthetic construct
  source 1..110: mol_type = other DNA
gcatatagagtagaatatacttaggaaaatcatgagctgaaatactaggttaaggatcttgattatttccccaccccccacttttttttttctgttttatggccacacct

SEQ ID NO: 74839 - DNA, 110 bp, synthetic construct
  source 1..110: mol_type = other DNA
ttttcatttttgtcatgttcatatttttaaagcaaacaaacaaaactcctttgtgtccctgcagtaacccaaagtcatactgccttggcaacagtagctagtccactgga

SEQ ID NO: 74840 - DNA, 110 bp, synthetic construct
  source 1..110: mol_type = other DNA
catagcagcccaaatttctgggacttgtagtatttttcccattagtgttttcactaattggcaagtttatgttccaaagatttctagctgccactgtttttttttttttt

SEQ ID NO: 74841 - DNA, 110 bp, synthetic construct
  source 1..110: mol_type = other DNA
gctgaaggggcaggaggacacttacatgctcttgaaaaaccagctcctgggctgtgtggcttctcccctcagagaactacctttactgagttatattttcttgcaacatt

SEQ ID NO: 74842 - DNA, 110 bp, synthetic construct
  source 1..110: mol_type = other DNA
cctctacattctatttccctttaaggatctaactttttttcctgactagcgacctggattccatactactccagagctgtccgctgtcagaggggaggttctgatgttag

SEQ ID NO: 74843 - DNA, 110 bp, synthetic construct
  source 1..110: mol_type = other DNA
ggattccatactactccagagctgtccgctgtcagaggggaggttctgatgttagaacctgaaaatggtcctctgtgtgagagagagagagagagagagagtgtgtgtgt

SEQ ID NO: 74844 - DNA, 110 bp, synthetic construct
  source 1..110: mol_type = other DNA
tagctgagacctataccacagccatggtaacacccagtcagagctacttctgcaacctaggccacagcttgctgcgatactgaatccttaacccactgatcgaggccagg

SEQ ID NO: 74845 - DNA, 110 bp, synthetic construct
  source 1..110: mol_type = other DNA
ttccgcatggcagcctggcactgggccgtgcagaggtgtcctcgctatcacactagtctggaaatatgggcattaagtgcaattctggtgaagtgtcagatgtaaatatg

SEQ ID NO: 74846 - DNA, 110 bp, synthetic construct
  source 1..110: mol_type = other DNA
tgatactatgtcaagttcttaacctcatgagctacaacgggaactcctcaaattctaatgttacggcagcttctggggtagccgcaggctcgtgtctgggaatattcagg

SEQ ID NO: 74847 - DNA, 110 bp, synthetic construct; identical to SEQ ID NO: 74846
  source 1..110: mol_type = other DNA

SEQ ID NO: 74848 - DNA, 110 bp, synthetic construct
  source 1..110: mol_type = other DNA
aagagcaaaaaagacatttctcatattttaattagcaggtgaatggaattcctcgtgacattggtgttaagagaatcgcctcctttatgattttagatactctttaaaat

SEQ ID NO: 74849 - DNA, 110 bp, synthetic construct
  source 1..110: mol_type = other DNA
gaaggataggtgttaacactccttcaaaatgtttggtagaattccctcatgaaatcttctggtcttggacttttttggttgtgagtttttaaagttactgattcattttt

SEQ ID NO: 74850 - DNA, 110 bp, synthetic construct
  source 1..110: mol_type = other DNA
ctgctggcctatgccacaggccacagccttagcagtgctggatcccagcgcattttctacctgtgccacagcttgtggcaatgccaggtccttaattcactgagccaggc

SEQ ID NO: 74851 - DNA, 110 bp, synthetic construct; identical to SEQ ID NO: 74850
  source 1..110: mol_type = other DNA

SEQ ID NO: 74852 - DNA, 110 bp, synthetic construct
  source 1..110: mol_type = other DNA
tcacttaagttgataaactagtttactgagtgcagtagatactcttgacactgtttcaacaggagaatgagcctggattttgtaccagaccaacttaggttagaatccta

SEQ ID NO: 74853 - DNA, 110 bp, synthetic construct
  source 1..110: mol_type = other DNA
tcaacaggagaatgagcctggattttgtaccagaccaacttaggttagaatcctagctctatctatccctaggtgttggaggagaaatgctaaaaattcctaaatcctat

SEQ ID NO: 74854 - DNA, 110 bp, synthetic construct
  source 1..110: mol_type = other DNA
cattagaaaaaaacctacctcattttctctgattccaagttcaaatatcccagaaaaagattctgacttgtgcaatttgggacttgtggacttttaacaagtagacaccc

SEQ ID NO: 74855 - DNA, 110 bp, synthetic construct
  source 1..110: mol_type = other DNA
aaagattctgacttgtgcaatttgggacttgtggacttttaacaagtagacaccctaactgactcattaaggtgacttatgcacaggtcaaatggagatggcaaatccaa

SEQ ID NO: 74856 - DNA, 110 bp, synthetic construct
  source 1..110: mol_type = other DNA
tccgcaggaaccaaggaatgacagtacctgtaaagactggtgccaacaaaaccatgatctctaatctgaacttgactgttgtcaatcttttcatacctgccttccctccc

SEQ ID NO: 74857 - DNA, 110 bp, synthetic construct
  source 1..110: mol_type = other DNA
ctggtctcctgagactcataaatttgtctcctcaacttgaggaatctgacagactcctcctgggtttcccatcccaacaccaaaacctggaaattcttacaggcagcaag

SEQ ID NO: 74858 - DNA, 110 bp, synthetic construct
  source 1..110: mol_type = other DNA
gactctcgaataacatatatcctggttggtattggctctggctattgtagttttgaaatgtgtaactcttctaagtagctaactatttacagcttagcaattttatggaa

SEQ ID NO: 74859 - DNA, 110 bp, synthetic construct
  source 1..110: mol_type = other DNA
aaggggcgacgtccactggcggcggattaaaacacaaaagcaccttgcaggaaacccctgctgagctatttcaattcattcgtgtggagaagagctgtgtggagagtgtc

SEQ ID NO: 74860 - DNA, 110 bp, synthetic construct
  source 1..110: mol_type = other DNA
agcaatatggaatcacccaagtgggaagccttcagctgattccaagcagaacccataatttcctttagacgtcttattcggagcagcagcatttgaggctgctgtttgct

SEQ ID NO: 74861 - DNA, 110 bp, synthetic construct
  source 1..110: mol_type = other DNA
gaaatgcaacttttcaggtcccaacccagacctactaatcaaatactctgggcgtgggaaccagtggtctgtaacaagctcttcgggagcttctgatgcacaatgaagtt

SEQ ID NO: 74862 - DNA, 110 bp, synthetic construct
  source 1..110: mol_type = other DNA
gcctccggctccgctcaaggggctccacgccggcccctcgccctcactctcccaccgctcctcccctactcactttgggcttctcgggcaatttctttcggttcttcttc

SEQ ID NO: 74863 - DNA, 110 bp, synthetic construct
  source 1..110: mol_type = other DNA
agctctgggtgggaagggtctccccaaactcctcagtctcagtgagcttgagcctgactccctgtctaggtctgctgctggcatctggagtcacttgcgttattggcaaa

SEQ ID NO: 74864 - DNA, 110 bp, synthetic construct
  source 1..110: mol_type = other DNA
gcactcttgaatataactcaggctctccgctgactggcgagtgatgaaacaggagctgaagcaatttatcgtttcaagatgatggcagctggcagacagtgctggtgaga

SEQ ID NO: 74865 - DNA, 110 bp, synthetic construct
  source 1..110: mol_type = other DNA
cggccctgaggagacaaagagagccacctctagccctggagaagctcagtccttatcttactccatgatcaaggtgagagcccaacagatgagtttaggaaaccagtggt

SEQ ID NO: 74866 - DNA, 110 bp, synthetic construct
  source 1..110: mol_type = other DNA
taggattcagattggggttaggtcagcagagctccaggaagcagtttttaagtcaaggaagtattaacatgtgcaggcaagacaagttaggcccatgtagctgaaacata

SEQ ID NO: 74867 - DNA, 110 bp, synthetic construct
  source 1..110: mol_type = other DNA
gtgggggaaatcccaggttccagctgggatgggcatcggccaggcggggtctcttcattttagagtggagttttatgacacaaggaggcagcagagccaaggactgaaag

SEQ ID NO: 74868 - DNA, 110 bp, synthetic construct
  source 1..110: mol_type = other DNA
gtgggttccctaggccctcttgcctcttcttcagcctgttcctttgctccatgcaccgagctaaatacctgcccatatctcatatcattccaaacaggcagttgtggcag

SEQ ID NO: 74869 - DNA, 110 bp, synthetic construct
  source 1..110: mol_type = other DNA
ccgagctaaatacctgcccatatctcatatcattccaaacaggcagttgtggcagcaaagaccagaggggagctaaacttcatcagaaatggaatgaggagttcccatgg

SEQ ID NO: 74870 - DNA, 110 bp, synthetic construct
  source 1..110: mol_type = other DNA
gtgtccatgggccgtgatgatccagctactgctactttccagcttcaccttccaccacattcactctctgcacccattcattcggagctgctttcagcttcaggaacatc

SEQ ID NO: 74871 - DNA, 110 bp, synthetic construct
  source 1..110: mol_type = other DNA
cacattcactctctgcacccattcattcggagctgctttcagcttcaggaacatccccggccctttggtgtctcttgctttggtaaatgctggtctttacctggaaagct

SEQ ID NO: 74872 - DNA, 110 bp, synthetic construct
  source 1..110: mol_type = other DNA
tgtacgcatttgagataagaagtgtaggtagggtttggtcaagggattgggataaaataaagctgtagattatagataattgtagcactgtttcctttatgataaaactc

SEQ ID NO: 74873 - DNA, 110 bp, synthetic construct
  source 1..110: mol_type = other DNA
ttgtgtccaaattgcatatatgccttttacagaatacagtgcgtatttctggaatacaatgaactgtactcagctgaacagttaatgaactgtattcttaagtaaatgta

SEQ ID NO: 74874 - DNA, 110 bp, synthetic construct
  source 1..110: mol_type = other DNA
gacgggaactccgaggcttggaggatttaggcaattgactcaaaccataatgcttgaacaaggagctggtagaacaagggattcaaactcagatctcttcaaccaagaca

SEQ ID NO: 74875 - DNA, 110 bp, synthetic construct
  source 1..110: mol_type = other DNA
ctgcgtccaggatgtcagaaagatgtccatgattgacctggaccgaactatgcaagcgaaacctaggtcaccagagaaacaccgtgacaggtgagtaacgacttcatcat

SEQ ID NO: 74876 - DNA, 110 bp, synthetic construct
  source 1..110: mol_type = other DNA
gcgaaacctaggtcaccagagaaacaccgtgacaggtgagtaacgacttcatcatggcagtgggtgttcactgcaggccggctggttaggaagaactgtgaggttttcgt

SEQ ID NO: 74877 - DNA, 110 bp, synthetic construct; identical to SEQ ID NO: 74875
  source 1..110: mol_type = other DNA

SEQ ID NO: 74878 - DNA, 110 bp, synthetic construct; identical to SEQ ID NO: 74876
  source 1..110: mol_type = other DNA

SEQ ID NO: 74879 - DNA, 110 bp, synthetic construct
  source 1..110: mol_type = other DNA
catccactttggtccttcttggctggggccctctgagacatgcagaggagatgtgagccactggaggagaggtcagtcttcctgagcaaggctttccttccagggttcct

SEQ ID NO: 74880 - DNA, 110 bp, synthetic construct
  source 1..110: mol_type = other DNA
cctttaggaattgccacagccatgacttattagaaagtttatactcctgtgtggcttccctatgctactaacttcttcctcttctgcctctgcacaacttctaattatgc

SEQ ID NO: 74881 - DNA, 110 bp, synthetic construct
  source 1..110: mol_type = other DNA
ttccctatgctactaacttcttcctcttctgcctctgcacaacttctaattatgcctatggactgcatccttattcttgacctccttccctcttaatatttgttggaagc

SEQ ID NO: 74882 - DNA, 110 bp, synthetic construct
  source 1..110: mol_type = other DNA
gaaacagcttctcaggatgggcagatgcatgcaaatagttgcgtagacaagtacgaaattgtttctttgtagactaaacagtgtttgaagagacatcttaaggcttactt

SEQ ID NO: 74883 - DNA, 110 bp, synthetic construct
  source 1..110: mol_type = other DNA
aattgtattctggtgtttggattggatgccagagcactcttggatggggaaaatgtgtgtcctctgtcttacttgtctatacgttttccttctggccaagaagctgtctc

SEQ ID NO: 74884 - DNA, 110 bp, synthetic construct
  source 1..110: mol_type = other DNA
tgtgtcctctgtcttacttgtctatacgttttccttctggccaagaagctgtctctcactttctctttttataaagtccttctggatcttggttgctttggctttagcag

SEQ ID NO: 74885 - DNA, 110 bp, synthetic construct
  source 1..110: mol_type = other DNA
actggtcttcggctctgtttccttgtcattctctcgcctctactgtcctgcatacggtgcccacaatctctaaatggcttctttcatgtcatggacagcttgtagtagat

SEQ ID NO: 74886 - DNA, 110 bp, synthetic construct
  source 1..110: mol_type = other DNA
ggtgcccacaatctctaaatggcttctttcatgtcatggacagcttgtagtagattccagagatgcatgctttctggttcatgttccaaaagaaacagatacctgctctt

SEQ ID NO: 74887 - DNA, 110 bp, synthetic construct
  source 1..110: mol_type = other DNA
tcctgactggagctggaagtcctatgcagctgttccacaagagcttggcacccccagagagcttgggtggctagctgggttgctatgaagtgaacccaggaggctcctcc

SEQ ID NO: 74888 - DNA, 110 bp, synthetic construct
  source 1..110: mol_type = other DNA
aagacaattcccagcagaagtaaaagacaaactcaaacaataataactcagccgggtacactgaatgatattgggtgtttctgagcttgaggctgaccaatagctacagg

SEQ ID NO: 74889 - DNA, 110 bp, synthetic construct
  source 1..110: mol_type = other DNA
tctataaaatgtctttcatagcagaacgtcagctctccaaaccatgaaaagaaattcagttcactgaatcatgaacatacaatttcattaagtcttagtcacagatacct

SEQ ID NO: 74890 - DNA, 110 bp, synthetic construct; identical to SEQ ID NO: 74889
  source 1..110: mol_type = other DNA

SEQ ID NO: 74891 - DNA, 110 bp, synthetic construct
  source 1..110: mol_type = other DNA
ctgcaaggttgtagcctcgcttgcttctggtgtatgaccgctggttagtgaagttgatactggagcttgtggcagggttcctgatggatggggagagctaagtcttgtcc

SEQ ID NO: 74892 - DNA, 110 bp, synthetic construct
  source 1..110: mol_type = other DNA
gatactggagcttgtggcagggttcctgatggatggggagagctaagtcttgtccttctagtaagtgaggttgtgtccctgtgtgattagtggtggctgtgtgcctggga

SEQ ID NO: 74893 - DNA, 110 bp, synthetic construct
  source 1..110: mol_type = other DNA
tcaaggggaagtgcagtaagctaacttgctagagtcaacatgggtgcacaaaattcacttggactaaacttacaaccaagcatgccaaggcccaagtggcatccagccat

SEQ ID NO: 74894 - DNA, 110 bp, synthetic construct
  source 1..110: mol_type = other DNA
ccaacaatggtgccttgcctctcttccgggtccggagcttctcccagtttccctctgctgtggagttcactgctccttagcccctcatgccatcaccactgctgtcccca

SEQ ID NO: 74895 - DNA, 110 bp, synthetic construct; identical to SEQ ID NO: 74894
  source 1..110: mol_type = other DNA

SEQ ID NO: 74896 - DNA, 110 bp, synthetic construct
  source 1..110: mol_type = other DNA
ccctgactgaagaagagcagtaggctctgactgtccctacctcttatctgcagcaatccatgagatacatcccagcggttctgcaaaaaccatgactgtagaatattcac

SEQ ID NO: 74897 - DNA, 110 bp, synthetic construct
  source 1..110: mol_type = other DNA
atccatgagatacatcccagcggttctgcaaaaaccatgactgtagaatattcacaggagcacacatgactttgagccacttgggtactttacttatgaactcatattat

SEQ ID NO: 74898 - DNA, 110 bp, synthetic construct
  source 1..110: mol_type = other DNA
tgttaaatggtctctctatctccggtcttctttactctaaattcatcctattgttctgaccacacagatctcaaaactctgcattgggtagttcttttacttcacaaaac

SEQ ID NO: 74899 - DNA, 110 bp, synthetic construct
  source 1..110: mol_type = other DNA
gagagattctccttgcagccacagctatctgccttccacttatccccttgattttctccactctcttctccaactcataagaaagttttgagagtttgctttaaaaaaaa

SEQ ID NO: 74900 - DNA, 110 bp, synthetic construct
  source 1..110: mol_type = other DNA
aatattattgccactgtagtgatggacactagttttggccaacgtggcataatattctgtttcagatttcctcaaggctgggtagctcttggcaaggatggccagttttg

SEQ ID NO: 74901 - DNA, 110 bp, synthetic construct
  source 1..110: mol_type = other DNA
tggccaacgtggcataatattctgtttcagatttcctcaaggctgggtagctcttggcaaggatggccagttttgctttgcctcgtctgatcattttcagagtctgcttg

SEQ ID NO: 74902 - DNA, 110 bp, synthetic construct; identical to SEQ ID NO: 74900
  source 1..110: mol_type = other DNA

SEQ ID NO: 74903 - DNA, 110 bp, synthetic construct
  source 1..110: mol_type = other DNA
tctgtttcagatttcctcaaggctgggtagctcttggcaaggatggccagttttgctttgcctcgtctgatcattttcagagtctgcttgtacatactttccacttttca

SEQ ID NO: 74904 - DNA, 110 bp, synthetic construct
  source 1..110: mol_type = other DNA
gggttagccaggttgctgggaggcaaaggagcacttcctcagggcaggcagaactggcaggactgtactgtgatggaggagacttcctgtggctgggcagggcctgcctt

SEQ ID NO: 74905 - DNA, 110 bp, synthetic construct
  source 1..110: mol_type = other DNA
ggcaggactgtactgtgatggaggagacttcctgtggctgggcagggcctgccttggtgcttctgagccacagaggtctttcagggggtgagcagtgctgggcagctgct

SEQ ID NO: 74906 - DNA, 110 bp, synthetic construct
  source 1..110: mol_type = other DNA
aggcagaactggcaggactgtactgtgatggaggagacttcctgtggctgggcagggcctgccttggtgcttctgagccacagaggtctttcagggggtgagcagtgctg

SEQ ID NO: 74907 - DNA, 110 bp, synthetic construct; identical to SEQ ID NO: 74906
  source 1..110: mol_type = other DNA

SEQ ID NO: 74908 - DNA, 110 bp, synthetic construct
  source 1..110: mol_type = other DNA
tgaagatgattgaagggcataaagtaaagggaacagcaatgggaaatgagacttgagaggtgtatagaggctgcttcgtgcttaataacatggttaattgttaaattatg

SEQ ID NO: 74909 - DNA, 110 bp, synthetic construct
  source 1..110: mol_type = other DNA
tgcccccataatgagaaacagctgacccctgctttcccagaagaccctccaaggcacacaagtaggcctggctgagattcttatggttgtcactgatttgccctggaacc

SEQ ID NO: 74910 - DNA, 110 bp, synthetic construct
  source 1..110: mol_type = other DNA
ttagggagaagccccccccgggggggggcattagagatccctagagtggcaaagcaagtggagtgacagcagaatagtggcactcatccctatagctgcaaagagtagtc

SEQ ID NO: 74911 - DNA, 110 bp, synthetic construct
  source 1..110: mol_type = other DNA
aagtggagtgacagcagaatagtggcactcatccctatagctgcaaagagtagtccctcaagccttcctggcaaaggaaggggaggcaggagaaactgctgacattgcaa

SEQ ID NO: 74912 - DNA, 110 bp, synthetic construct; identical to SEQ ID NO: 74910
  source 1..110: mol_type = other DNA

SEQ ID NO: 74913 - DNA, 110 bp, synthetic construct; identical to SEQ ID NO: 74911
  source 1..110: mol_type = other DNA

SEQ ID NO: 74914 - DNA, 110 bp, synthetic construct
  source 1..110: mol_type = other DNA
cccatgctcagacacaaccagacacacagtcaaaaattctcatgtaggtataaaacccaccttactattacacagtccacgtgttcttctgaatttaattcagggtagtc

SEQ ID NO: 74915 - DNA, 110 bp, synthetic construct
  source 1..110: mol_type = other DNA
cccaccttactattacacagtccacgtgttcttctgaatttaattcagggtagtctaaaatatactttcaatcatttggtactggcagaatatgaaagtttataaacaga

SEQ ID NO: 74916 - DNA, 110 bp, synthetic construct; identical to SEQ ID NO: 74914
  source 1..110: mol_type = other DNA

SEQ ID NO: 74917 - DNA, 110 bp, synthetic construct; identical to SEQ ID NO: 74915
  source 1..110: mol_type = other DNA

SEQ ID NO: 74918 - DNA, 110 bp, synthetic construct
  source 1..110: mol_type = other DNA
ttcagttgctcaaggagatcatcatctaggtacaatcactgcagccaagaccccagccaatgtcccaggccccagttcccagtctgtcacatagttcttttccaggatta

SEQ ID NO: 74919 - DNA, 110 bp, synthetic construct
  source 1..110: mol_type = other DNA
gccaatgtcccaggccccagttcccagtctgtcacatagttcttttccaggattatatatgaaaggctagaagtattttccaggaaaggaactcatgggccacaagatat

SEQ ID NO: 74920 - DNA, 110 bp, synthetic construct
  source 1..110: mol_type = other DNA
tactgtggcgtttggcacgggcatcacgtgatatagctcaacttagtggaacctcagaagaggagaaaaagcttttggtgtatgaagccctggagtatgcaaaaagagcc

SEQ ID NO: 74921 - DNA, 110 bp, synthetic construct
  source 1..110: mol_type = other DNA
agaagaggagaaaaagcttttggtgtatgaagccctggagtatgcaaaaagagccctagaaaaaaatgaatcaagttttgcagctcataaggtgagatgcttacagtagt

SEQ ID NO: 74922 - DNA, 110 bp, synthetic construct; identical to SEQ ID NO: 74920
  source 1..110: mol_type = other DNA

SEQ ID NO: 74923 - DNA, 110 bp, synthetic construct; identical to SEQ ID NO: 74921
  source 1..110: mol_type = other DNA

SEQ ID NO: 74924 - DNA, 110 bp, synthetic construct
  source 1..110: mol_type = other DNA
ttctatctctgtgaacttgccagaaaagactaggctattcatataaatggaaacatgcaatatgtggtttcttttgtttaactttttcatttagcacaatgtttttcagg

SEQ ID NO: 74925 - DNA, 110 bp, synthetic construct
  source 1..110: mol_type = other DNA
tgcaatatgtggtttcttttgtttaactttttcatttagcacaatgtttttcaggcttatccatgttttaggataccatgtgtcaatagattgttcttttccaatgttga

SEQ ID NO: 74926 - DNA, 110 bp, synthetic construct
  source 1..110: mol_type = other DNA
tctaaagggaagctctctatagaaaagctctcagtttaaggcattttatatgtgactggagtcttcacttgacgtgtcactcagttcaggagtaacacggatgtgtctga

SEQ ID NO: 74927 - DNA, 110 bp, synthetic construct
  source 1..110: mol_type = other DNA
ctggagtcttcacttgacgtgtcactcagttcaggagtaacacggatgtgtctgaggaacttggcatctaggccaactaaaatctgtttgcaagagggctgaggagtctt

SEQ ID NO: 74928 - DNA, 110 bp, synthetic construct; identical to SEQ ID NO: 74926
  source 1..110: mol_type = other DNA

SEQ ID NO: 74929 - DNA, 110 bp, synthetic construct; identical to SEQ ID NO: 74927
  source 1..110: mol_type = other DNA

SEQ ID NO: 74930 - DNA, 110 bp, synthetic construct
  source 1..110: mol_type = other DNA
ttgaaaaatatttcaatttattttaatcatctgtgtggtgagtttattcagggacaaaagaagaatctttcgctaactctctggatgagtgtttggggtttatgttttgt

SEQ ID NO: 74931 - DNA, 110 bp, synthetic construct
  source 1..110: mol_type = other DNA
aaaagaagaatctttcgctaactctctggatgagtgtttggggtttatgttttgttttgttttgtttaaaaagtaaatcatgtggccacacctgtggcatatggaagttc

SEQ ID NO: 74932 - DNA, 110 bp, synthetic construct
  source 1..110: mol_type = other DNA
gatatttcaaacatatactaaagtacagagtgtatagcaagccagcttcattttcaatataatgtgcttaactcaaaacaagctcttggtccttgattccaccatagaat

SEQ ID NO: 74933 - DNA, 110 bp, synthetic construct
  source 1..110: mol_type = other DNA
ctagccagtgattttctacctaaacttgtaatagacaaggttatcaaagacagatgaactctttaaaaattaatccttatgtgactttaaacttctcgtgtatgtctttt

SEQ ID NO: 74934 - DNA, 110 bp, synthetic construct
  source 1..110: mol_type = other DNA
caggtgtagttactgcagtacctatagagcctcttcaaaatgaaaatgttcagaactgaattaaaacttctttctgaggttgtaccccttctgcatttgttgcatcattt

SEQ ID NO: 74935 - DNA, 110 bp, synthetic construct
  source 1..110: mol_type = other DNA
ctgaattaaaacttctttctgaggttgtaccccttctgcatttgttgcatcattttatagctccaaaattttccccaagttggtaagacttgtcaagcctaagagagtat

SEQ ID NO: 74936 - DNA, 110 bp, synthetic construct; identical to SEQ ID NO: 74934
  source 1..110: mol_type = other DNA

SEQ ID NO: 74937 - DNA, 110 bp, synthetic construct; identical to SEQ ID NO: 74935
  source 1..110: mol_type = other DNA

SEQ ID NO: 74938 - DNA, 110 bp, synthetic construct
  source 1..110: mol_type = other DNA
atattgacaattgtaatatcctcttcttgaatggattccttctttgtctctctttatggccttcattttaaagtctactttgtctgatacaagtattgtgactcctgcta

SEQ ID NO: 74939 - DNA, 110 bp, synthetic construct; identical to SEQ ID NO: 74938
  source 1..110: mol_type = other DNA

SEQ ID NO: 74940 - DNA, 110 bp, synthetic construct
  source 1..110: mol_type = other DNA
gcttcaggcctctacccgagctacatccacatcagatctgagctgcatctgcaaactatgcagcagcttatggcaatgccagatccttagccccacaaatcaaatcagat

SEQ ID NO: 74941 - DNA, 110 bp, synthetic construct; identical to SEQ ID NO: 74940
  source 1..110: mol_type = other DNA

SEQ ID NO: 74942 - DNA, 110 bp, synthetic construct
  source 1..110: mol_type = other DNA
tttcatggctatcatacactttggagtttgttttggggaatgaatctgccttctccccacattgtgggcttttctgattaaaacaactttcctttttaccagctcttgtc

SEQ ID NO: 74943 - DNA, 110 bp, synthetic construct
  source 1..110: mol_type = other DNA
cccacattgtgggcttttctgattaaaacaactttcctttttaccagctcttgtctttggagtattggcttttgaacaatgaacagccagtcctgagtttggtaacatct

SEQ ID NO: 74944 - DNA, 110 bp, synthetic construct; identical to SEQ ID NO: 74942
  source 1..110: mol_type = other DNA

SEQ ID NO: 74945 - DNA, 110 bp, synthetic construct
  source 1..110: mol_type = other DNA
ctgccttctccccacattgtgggcttttctgattaaaacaactttcctttttaccagctcttgtctttggagtattggcttttgaacaatgaacagccagtcctgagttt

SEQ ID NO: 74946 - DNA, 110 bp, synthetic construct
  source 1..110: mol_type = other DNA
ttgaaggaaaagtataaggaccaaagacaaacactgcctgtcctccaagtattgcctctaatcttttgcatcagccctagctgataatcatgcaatcttttcaatttagt

SEQ ID NO: 74947 - DNA, 110 bp, synthetic construct
  source 1..110: mol_type = other DNA
tcacataaaagtgttaaaatcttttccacagaatcttttggtagagaaagaaacgctgcatcaataagcctcttgattatgtgccatctgcccatattgttatcccacac

SEQ ID NO: 74948 - DNA, 110 bp, synthetic construct
  source 1..110: mol_type = other DNA
ctgcatcaataagcctcttgattatgtgccatctgcccatattgttatcccacacttcatttttctgtgcatcctcaaacttgcagactgtcatgcatattcctttataa

SEQ ID NO: 74949 - DNA, 110 bp, synthetic construct
  source 1..110: mol_type = other DNA
agtagaatatggaaccgagtctatgttctagttttccaggtatgccacataatacggccctatttgagcaacattgcccagcatcatcagaacctatctgtgatcattag

SEQ ID NO: 74950 - DNA, 110 bp, synthetic construct
  source 1..110: mol_type = other DNA
ggccctatttgagcaacattgcccagcatcatcagaacctatctgtgatcattagctaaccactgattgttaaaggggagaagagcatccattactatgacaaatacacc

SEQ ID NO: 74951 - DNA, 110 bp, synthetic construct
  source 1..110: mol_type = other DNA
agcaccactccctaatcccggaaggttttctcatgctccttcccagtcaatgccccgccctgtcccagctccaacaaaagcaagacgtgatttcatttctatagctatag

SEQ ID NO: 74952 - DNA, 110 bp, synthetic construct
  source 1..110: mol_type = other DNA
cacccgtactcaatcctccatcaccaccgttgtagttgaacctgctgaagctgttgggaaactttcatgctaaagcagctcaagttataggtcagaggcaataaaaccac

SEQ ID NO: 74953 - DNA, 110 bp, synthetic construct
  source 1..110: mol_type = other DNA
gggaaactttcatgctaaagcagctcaagttataggtcagaggcaataaaaccacatgaggcaatgtttgtgtttttttccccgaacagtaaagaagccagtctgtgaca

SEQ ID NO: 74954 - DNA, 110 bp, synthetic construct; identical to SEQ ID NO: 74952
  source 1..110: mol_type = other DNA

SEQ ID NO: 74955 - DNA, 110 bp, synthetic construct; identical to SEQ ID NO: 74953
  source 1..110: mol_type = other DNA

SEQ ID NO: 74956 - DNA, 110 bp, synthetic construct
  source 1..110: mol_type = other DNA
aagtagggtggtgagaggtagccctgtgcagaggagatctcttggcgaaacagtgtcaaaatttcctagtgctgctggggcacccattgtggaacctctagctttcagta

SEQ ID NO: 74957 - DNA, 110 bp, synthetic construct
  source 1..110: mol_type = other DNA
tcaaaatttcctagtgctgctggggcacccattgtggaacctctagctttcagtactggttgccgtgggatttgaatggtgggcggcagtgctgtggtgcttcggccagt

SEQ ID NO: 74958 - DNA, 110 bp, synthetic construct
  source 1..110: mol_type = other DNA
ctctgggagaagccaggtaccatgttgtgaagtcacttgagcagctctgtgaaaagggtcacatgataaggaactgagccctcctgtcagcagtcagaaaggaactacgt

SEQ ID NO: 74959 - DNA, 110 bp, synthetic construct
  source 1..110: mol_type = other DNA
atgaacttgaaggctagtaatagctaatagcatccgtggaaccctgactagtgtgaggctgtgtgctggtgcttgcatatgttttctcatttcatcttctcaacggattt

SEQ ID NO: 74960 - DNA, 110 bp, synthetic construct
  source 1..110: mol_type = other DNA
ctctaaataaaattagcgcaatagctaggtgccattagagaccagcaggtaaatactcaaaaatgttgctcttacctttaaataatcatttacttggtaaataattttga

SEQ ID NO: 74961 - DNA, 110 bp, synthetic construct; identical to SEQ ID NO: 74960
  source 1..110: mol_type = other DNA

SEQ ID NO: 74962 - DNA, 110 bp, synthetic construct
  source 1..110: mol_type = other DNA
catcgtcatgcttaagaaaatgtccatatgtcaattagcttcttggtgcaattcatccagtttaaaaaaggcaattctgggggaaacaatatacatgttgtcagcgggtg

SEQ ID NO: 74963 - DNA, 110 bp, synthetic construct; identical to SEQ ID NO: 74962
  source 1..110: mol_type = other DNA

SEQ ID NO: 74964 - DNA, 110 bp, synthetic construct
  source 1..110: mol_type = other DNA
cgactgctcccagaaaccgaaaaagaacattccctgaaaccacatcttcctctacatgagcccgggccctgggctggcggccactgtggatggcgccccggcggccgttc

SEQ ID NO: 74965 - DNA, 110 bp, synthetic construct
  source 1..110: mol_type = other DNA
ctgtttttcttatcagcaaagtgttggcaattgtcagaagaccttgtgtaggaggttactgagacagctgtgatgataaagtttatcaagaggtcaagtctagtctttga

SEQ ID NO: 74966 - DNA, 110 bp, synthetic construct
  source 1..110: mol_type = other DNA
ctaatacaatctcagagcctaatcttcattagcttcacagtcaatattcttctagcagtgaggaaatgtggtgcctcaggaaatcagatgtcaaagagaaccagatatta

SEQ ID NO: 74967 - DNA, 110 bp, synthetic construct
  source 1..110: mol_type = other DNA
cagtgaggaaatgtggtgcctcaggaaatcagatgtcaaagagaaccagatattagtgacttgtcacagaggccatggcagtgatcatggccaccagcagcagatgtgac

SEQ ID NO: 74968 - DNA, 110 bp, synthetic construct
  source 1..110: mol_type = other DNA
ttcataatggctttcaaacattagatcatttcacagcaggacaaagctcccactggagtcctaccattgcccaccctccaaaaggggcacctgctgccccatttgcaccc

SEQ ID NO: 74969 - DNA, 110 bp, synthetic construct
  source 1..110: mol_type = other DNA
gtcatatctgcagcatgtggaggttcccaggtcagggatcaaacctgagcagaagctgcaacttgtgccacagccacagtaacgccagatccccaaccaactacaccaca

SEQ ID NO: 74970 - DNA, 110 bp, synthetic construct
  source 1..110: mol_type = other DNA
ctgcaacttgtgccacagccacagtaacgccagatccccaaccaactacaccacaagggaacttccttgtctaccatttttgcttcattttgctcatatttaaaagtccc

SEQ ID NO: 74971 - DNA, 110 bp, synthetic construct; identical to SEQ ID NO: 74969
  source 1..110: mol_type = other DNA

SEQ ID NO: 74972 - DNA, 110 bp, synthetic construct; identical to SEQ ID NO: 74970
  source 1..110: mol_type = other DNA

SEQ ID NO: 74973 - DNA, 110 bp, synthetic construct
  source 1..110: mol_type = other DNA
gctgctttaagctatgattcattgattctagataatgctgccagcttttatcagtgatgattttgggccatttgttgctattatagttgggccattggactcaagctcaa

SEQ ID NO: 74974 - DNA, 110 bp, synthetic construct; identical to SEQ ID NO: 74973
  source 1..110: mol_type = other DNA

SEQ ID NO: 74975 - DNA, 110 bp, synthetic construct; identical to SEQ ID NO: 74973
  source 1..110: mol_type = other DNA

SEQ ID NO: 74976 - DNA, 110 bp, synthetic construct; identical to SEQ ID NO: 74973
  source 1..110: mol_type = other DNA

SEQ ID NO: 74977 - DNA, 110 bp, synthetic construct
  source 1..110: mol_type = other DNA
agcctcttgtctagagaagattttttttttttttaacttagagctgtctagccgggatacattattagtggaatataagttatcgggaagaggagttgacagaagctttg

SEQ ID NO: 74978 - DNA, 110 bp, synthetic construct
  source 1..110: mol_type = other DNA
agctgctggcctgcaccacagccacaacaacacaggatctgagctgcctctgtgagctgtatcatagctcatggcaacattggttccctaaacccctgagcaaggccagg

SEQ ID NO: 74979 - DNA, 110 bp, synthetic construct; identical to SEQ ID NO: 74978
  source 1..110: mol_type = other DNA

SEQ ID NO: 74980 - DNA, 110 bp, synthetic construct
  source 1..110: mol_type = other DNA
cagcctgatcagggcttaagcttttctgagtccccgtagatctctccatttgcagaatgatggcaccgtccacaagagttgaatggtctgcaactttagtgtttgttttc

SEQ ID NO: 74981 - DNA, 110 bp, synthetic construct
  source 1..110: mol_type = other DNA
aatgatggcaccgtccacaagagttgaatggtctgcaactttagtgtttgttttcagcctgtgacataggcagtgtctcgattttatgaaacaggtgagccatcttcttt

SEQ ID NO: 74982 - DNA, 110 bp, synthetic construct
  source 1..110: mol_type = other DNA
tttcacatagaaaatggaggttacatgaactacctcaattttctgctcttccatttgtacacctattagcattggcaccaatctcaggaatttttcctacacaaagcttc

SEQ ID NO: 74983 - DNA, 110 bp, synthetic construct
  source 1..110: mol_type = other DNA
tgtacacctattagcattggcaccaatctcaggaatttttcctacacaaagcttctccactaatgtgatgctagtgtattcatgtgagctcttgattcctgagtcctcga

SEQ ID NO: 74984 - DNA, 110 bp, synthetic construct
  source 1..110: mol_type = other DNA
atgttcatggatttttttaagtggaaaataaagctacccacaaatcttgttgatggaagggacctaacttttttttttttttttttgtctttttgccttttctagggccg

SEQ ID NO: 74985 - DNA, 110 bp, synthetic construct
  source 1..110: mol_type = other DNA
tggggtagctctggtgtctaaatgctattgtgttcattttcaaaaaactaagtcatatgccaaaaggtaaaaaaaaaccaagaaacacacacacaaaaaataaagatctg

SEQ ID NO: 74986 - DNA, 110 bp, synthetic construct
  source 1..110: mol_type = other DNA
aaggcccaccagtttagctcacaccccagctctcttcaagtcaaggagacctgactgtgccaaaagaggggcagggcagtggaggttaatgcacatccaagtctcacttt

SEQ ID NO: 74987 - DNA, 110 bp, synthetic construct
  source 1..110: mol_type = other DNA
tgtgccaaaagaggggcagggcagtggaggttaatgcacatccaagtctcactttctcttagattaagggtatgtaagaaatatggtttttcatcatgaaaacagttgca

SEQ ID NO: 74988 - DNA, 110 bp, synthetic construct
  source 1..110: mol_type = other DNA
cttgcagattttagagtctaggctgcaccatcatctcttacatgaacctgctggcctgtcttatggatttcagactcaccagcttccacaattatgtgactcaatccctt

SEQ ID NO: 74989 - DNA, 110 bp, synthetic construct
  source 1..110: mol_type = other DNA
ctgtcttatggatttcagactcaccagcttccacaattatgtgactcaatcccttaatataaatctctctctctctctctctctctctctctctctctctctctatatat

SEQ ID NO: 74990 - DNA, 110 bp, synthetic construct
  source 1..110: mol_type = other DNA
ttattgctttggaccattggagcccttaagcaaatgcttagttttagctttcatacaaaagccattgtcaaaagggtttttggttctccagatgccttatttcctttggc

SEQ ID NO: 74991 - DNA, 110 bp, synthetic construct
  source 1..110: mol_type = other DNA
caaaagccattgtcaaaagggtttttggttctccagatgccttatttcctttggctttaagcatccttcatctcttcttttccaatgccccagggctaaatcttttgtaa

SEQ ID NO: 74992 - DNA, 110 bp, synthetic construct
  source 1..110: mol_type = other DNA
ctaaaaagaaacaaataaacaaacaaaaagggctctaggctcaaatccggactggaattcttgctgactcaggaagcttagacgagctactttcagcctcaaccatctcc

SEQ ID NO: 74993 - DNA, 110 bp, synthetic construct
  source 1..110: mol_type = other DNA
aattcttgctgactcaggaagcttagacgagctactttcagcctcaaccatctccactccaccctgactctgtcatacccaagccttcctctgggtcatttcttcaggca

SEQ ID NO: 74994 - DNA, 110 bp, synthetic construct
  source 1..110: mol_type = other DNA
ctctagagcacctttcacatctttattttttcctgcagggcttctacccacatttcattcagctggtctaaatcctatgtcaatgtcattttctagtttctcccaagtct

SEQ ID NO: 74995 - DNA, 110 bp, synthetic construct
  source 1..110: mol_type = other DNA
cattcagctggtctaaatcctatgtcaatgtcattttctagtttctcccaagtcttttgttcaaacaggggttcaccccttgtgaaagtaatatctccctccttttcttt

SEQ ID NO: 74996 - DNA, 110 bp, synthetic construct
  source 1..110: mol_type = other DNA
gaactagggtttgagttctaattctagcccaactatttcagcttcctgctctcaggtgaatcaattcctttgtttttgaggcagagacagcagtatgcatggactacaca

SEQ ID NO: 74997 - DNA, 110 bp, synthetic construct
  source 1..110: mol_type = other DNA
aaagaacacaattctgtttctgtctttgttgttgaaactcatcctttgtcccctggtgaccaatagaaactcagagacagagctttgggtgaaggagaaaaagagctttt

SEQ ID NO: 74998 - DNA, 110 bp, synthetic construct
  source 1..110: mol_type = other DNA
ggaactagtgtatctgatctaataatttcatgctcagcagtcttatattttgcagctgacagcattagacatattaggatgaactttagagacacaggtgtctgcacaca

SEQ ID NO: 74999 - DNA, 110 bp, synthetic construct
  source 1..110: mol_type = other DNA
ctgacagcattagacatattaggatgaactttagagacacaggtgtctgcacacatgtagaaatgcagaagtttcacgtgcaagtgtggagattcctatctaattatgaa

SEQ ID NO: 75000 - DNA, 110 bp, synthetic construct
  source 1..110: mol_type = other DNA
aaggcaagggtaaggcacgtggaggagagagcttggccaggcaggaggtgtgcggagctgctgagctccgtgttcgagatttagaggtgtcagcaggacacacactttca

SEQ ID NO: 75001 - DNA, 110 bp, synthetic construct
  source 1..110: mol_type = other DNA
atctcacactagacaaggtgtgagctgcatgtggccagggtttgtggaaaagcgatgtgttctgcatccctgtgaaatatgtgaatgactgtgtggtcatttgtcaccag

SEQ ID NO: 75002 - DNA, 110 bp, synthetic construct
  source 1..110: mol_type = other DNA
gatatttaagtttagagcatgagttcctaaaacgtgactgaataatagaattttttcatatctctaataagttgctgatggttgtagctaggggctcctactctttaaga

SEQ ID NO: 75003 - DNA, 110 bp, synthetic construct
  source 1..110: mol_type = other DNA
tcatatctctaataagttgctgatggttgtagctaggggctcctactctttaagaatttttcctctaattttctggaactgcatactcattcttttagaagacttccttt

SEQ ID NO: 75004 - DNA, 110 bp, synthetic construct
  source 1..110: mol_type = other DNA
tcatggcaacgccagatcctgacccactgagcgaagccagagaatcgaacccatatcctcaagtataccaggtgggttcttaacccactaagccacaacaagagctcttc

SEQ ID NO: 75005 - DNA, 110 bp, synthetic construct; identical to SEQ ID NO: 75004
  source 1..110: mol_type = other DNA

SEQ ID NO: 75006 - DNA, 110 bp, synthetic construct
  source 1..110: mol_type = other DNA
cctaaaggcagattctttcttagagcttccagataagagccccacaggctgatagttttatttcagctttgtgagagactaagccagctgagccaatcagacatctaacc

SEQ ID NO: 75007 - DNA, 110 bp, synthetic construct
  source 1..110: mol_type = other DNA
gtcttccaaaggcattcaggagctaaaaacccaaaactcatgtttaaaaataccgtccaggagtttccatcgtggctcagtggtaacaatcccgactagtacccatgagc

SEQ ID NO: 75008 - DNA, 110 bp, synthetic construct
  source 1..110: mol_type = other DNA
ccctcccccaacccctgccccagcaacttaactaatgtttcctgtttgagttaaagtcaacacccatttgctgaaaaccagatcctgagggcctaagcggggaaagcctt

SEQ ID NO: 75009 - DNA, 110 bp, synthetic construct
  source 1..110: mol_type = other DNA
gtcaacacccatttgctgaaaaccagatcctgagggcctaagcggggaaagcctttagcaggattgaccttgaagttgaggttggataaggaggaaagtgaggactggat

SEQ ID NO: 75010 - DNA, 110 bp, synthetic construct
  source 1..110: mol_type = other DNA
tttgaggaaagggtctaactcggggctctctacctgcacactgagatggggccgcaggtttcttcttttctttttaatcattgtgtacaatctgaatgagagaagactca

SEQ ID NO: 75011 - DNA, 110 bp, synthetic construct
  source 1..110: mol_type = other DNA
tcatcatcaagcatcttttgttttttctttcttaaggggcagcctgtcattttcttcagctgttatttcccccaatcatcagtatccttgtccacagaaccaaaaaaaaa

SEQ ID NO: 75012 - DNA, 110 bp, synthetic construct
  source 1..110: mol_type = other DNA
aatatattttaggtttgcatatattaccccaaaggtaattctagataaggcttgtctgagaagaagcaattcaagtcttgctcaacttggccaactaaattcttgtgttt

SEQ ID NO: 75013 - DNA, 110 bp, synthetic construct
  source 1..110: mol_type = other DNA
tatattttaaacaccagaaacacaaaaatgaatgcagatgctctcccttcaaagggcttccaatctctgcacaaattactcacgggtttgacaggagaaataaaataaag

SEQ ID NO: 75014 - DNA, 110 bp, synthetic construct
  source 1..110: mol_type = other DNA
gcttccaatctctgcacaaattactcacgggtttgacaggagaaataaaataaagacatcttacacttatatctcatcatttaaatctgtccatggggaagaaaggcaaa

SEQ ID NO: 75015 - DNA, 110 bp, synthetic construct
  source 1..110: mol_type = other DNA
gatctagaactcacagatttttgaccttttaacacatctgcaatgtctttatacaacttcccaatacagagcagtggaagagatatcagttattctctttgacctagttt

SEQ ID NO: 75016 - DNA, 110 bp, synthetic construct; identical to SEQ ID NO: 75015
  source 1..110: mol_type = other DNA

SEQ ID NO: 75017 - DNA, 110 bp, synthetic construct; identical to SEQ ID NO: 75015
  source 1..110: mol_type = other DNA

SEQ ID NO: 75018 - DNA, 110 bp, synthetic construct; identical to SEQ ID NO: 75015
  source 1..110: mol_type = other DNA

SEQ ID NO: 75019 - DNA, 110 bp, synthetic construct
  source 1..110: mol_type = other DNA
agtgccacagtgccaacaacatgagctttggagccatcataaaaatgataacacgattttgtattaggcatctaattttgtaccagatgcatttaaccctcacaacatac

SEQ ID NO: 75020 - DNA, 110 bp, synthetic construct
  source 1..110: mol_type = other DNA
ggattgtccagttgcctttggtctaggtaggcgctagcttcagtattatatcatcattttcagcctctgaggttttcccctaccccattgccagcctacccatgcatatt

SEQ ID NO: 75021 - DNA, 110 bp, synthetic construct
  source 1..110: mol_type = other DNA
cacaaagtaaggttcaagaaataccaaagactctatatcacatagaccatattctctggttgtaatgcagctgttagaaattatttattttaagggagttcccattgtcg

SEQ ID NO: 75022 - DNA, 110 bp, synthetic construct
  source 1..110: mol_type = other DNA
ctggttgtaatgcagctgttagaaattatttattttaagggagttcccattgtcgctcaacagtaataaacccaactagtatccatgagcacattggttccatccctggc

SEQ ID NO: 75023 - DNA, 110 bp, synthetic construct
  source 1..110: mol_type = other DNA
tatccaccatttttcctcatgctaatacatctatttccagcttggaaaaatcatttatggaattattagggcctaaatagttaaaaggactaacatatatgcagatcatt

SEQ ID NO: 75024 - DNA, 110 bp, synthetic construct
  source 1..110: mol_type = other DNA
acgtttgatccctcagtggggaatttccgaatgttgcagccttggccaaaagagagaagcttgaacagactcagtacagtgctgttcttggggctctttcagtcatctga

SEQ ID NO: 75025 - DNA, 110 bp, synthetic construct
  source 1..110: mol_type = other DNA
ccataaaaatgtatatatgtaatcacttaatgagagaatatagcttgacttatttgttcttatatgtaggatcataaaaacagggtcagggtgttagtgaccaaagaaac

SEQ ID NO: 75026 - DNA, 110 bp, synthetic construct
  source 1..110: mol_type = other DNA
acctcctaaattttacttccattaatcctcctccttcagtcttatctctttccatgtgggcccatcccatcccctgatctaccagtgcagctccccaaatgccccgggtt

SEQ ID NO: 75027 - DNA, 110 bp, synthetic construct
  source 1..110: mol_type = other DNA
atttaaagcatttttacttcatattcattctgaagaatctgtggagcccttcattgaggagatggcagggagttaaaaagctcacaggataagaaagagccagtaaaatc

SEQ ID NO: 75028 - DNA, 110 bp, synthetic construct
  source 1..110: mol_type = other DNA
gaggagatggcagggagttaaaaagctcacaggataagaaagagccagtaaaatctttgaatttaactgtctgtgtaacccaggaactgatgacatgtaaactaatgata

SEQ ID NO: 75029 - DNA, 110 bp, synthetic construct
  source 1..110: mol_type = other DNA
catggggggacacagaaaggcttttgtacccaggagccccacagggccctgcttggtttcagggcccattcctcacaggtgcgctacatgggtccaggagccgagggatt

SEQ ID NO: 75030 - DNA, 110 bp, synthetic construct
  source 1..110: mol_type = other DNA
gtttcagggcccattcctcacaggtgcgctacatgggtccaggagccgagggattggcttctctcagtattattcccatggacccacttgtagaatttttgttttccatc

SEQ ID NO: 75031 - DNA, 110 bp, synthetic construct
  source 1..110: mol_type = other DNA
catttctgtgaagtcctgtcagactgaggaataagaacccaaattatttgatacatttaccaatgatttatttagctttttttttttttttagggccacacccatggcat

SEQ ID NO: 75032 - DNA, 110 bp, synthetic construct
  source 1..110: mol_type = other DNA
gggaggtttcccggaaagccaaaggaaaatggttacataggaggtcagagccatccagtgctgtcagcagctgtgggcaccagctgactgagccgagcatggcctctgag

SEQ ID NO: 75033 - DNA, 110 bp, synthetic construct
  source 1..110: mol_type = other DNA
tgctcggaactactgtcagattggggaagctgttagggttcatcaggtccacttgtcccccctctgtgacccagcaattctgggccagcgaagaggagccaaaggcttta

SEQ ID NO: 75034 - DNA, 110 bp, synthetic construct
  source 1..110: mol_type = other DNA
aacgttattttaatgagctacagatttgaatgtggcctttgttcgtctgttgcttccgctcaattgcagtttcaccctaagacgacacaagacagattgatcaggcttcc

SEQ ID NO: 75035 - DNA, 110 bp, synthetic construct
  source 1..110: mol_type = other DNA
ccgctcaattgcagtttcaccctaagacgacacaagacagattgatcaggcttccagtcattgtgaggcttaaatgaagtgaacagggccttatgtttctaaaccaaatg

SEQ ID NO: 75036 - DNA, 110 bp, synthetic construct
  source 1..110: mol_type = other DNA
agaccgaggcaccatcatttctctcgtgatctgctgcagtagttttcaaactggtccctgcatttctactcttgactctcctgctccccaagcttagctcatcctccaca

SEQ ID NO: 75037 - DNA, 110 bp, synthetic construct
  source 1..110: mol_type = other DNA
ccctgcatttctactcttgactctcctgctccccaagcttagctcatcctccacagagctgccaaagtgaactgttcacatgtaaatcaaatcactccacatctcaaaac

SEQ ID NO: 75038 - DNA, 110 bp, synthetic construct
  source 1..110: mol_type = other DNA
agccagatgccatgagatgtgagcaggataagaggtccctatggcgtcgcttgaaacacagccactgcagagaacttggaagctgattcatctgcccctctgataactca

SEQ ID NO: 75039 - DNA, 110 bp, synthetic construct
  source 1..110: mol_type = other DNA
acacagccactgcagagaacttggaagctgattcatctgcccctctgataactcagctcagggtcaacgacttgaccacaagccagtaggaaaccctatgtgagaaccct

SEQ ID NO: 75040 - DNA, 110 bp, synthetic construct
  source 1..110: mol_type = other DNA
ctaaatgaagttttcacatgtggcagggttgaaaatctgcataaagaaactcatggccttcaaatagactgtcaaaattagaaaaatttttgtctatacttcaccgtcaa

SEQ ID NO: 75041 - DNA, 110 bp, synthetic construct
  source 1..110: mol_type = other DNA
gaattagctaagaatcatggaaaacacaatatcctaggtcagcttcctggaaatcacatagacttctgtcttccaggaggaggagtcaaactgagagccaaattcccatg

SEQ ID NO: 75042 - DNA, 110 bp, synthetic construct
  source 1..110: mol_type = other DNA
agaatatgtaaaacacagattcctttaaaatttgatagtcatgatgttgagactgctttgagagggcgtcccagggtcactttggttatgggcacttctgtttatcactt

SEQ ID NO: 75043 - DNA, 110 bp, synthetic construct
  source 1..110: mol_type = other DNA
ctttgagagggcgtcccagggtcactttggttatgggcacttctgtttatcactttactttctagtcctgctctatacaacttgtgagctcactcaccttatatgctccc

SEQ ID NO: 75044 - DNA, 110 bp, synthetic construct
  source 1..110: mol_type = other DNA
cttttcttagcacagggtttccatgtttttcctgggtgtgggcagctcccagactgcttccctgactcggcttcctaagcccacacttactgttctagcctgtatggatg

SEQ ID NO: 75045 - DNA, 110 bp, synthetic construct
  source 1..110: mol_type = other DNA
cctggactgttggggtggaggacaggcagcttgagtgcagtgggagcgaccgtgaggccagcctgagatggaggcagcagtgtctgtcttccttgctgcaacagcagaca

SEQ ID NO: 75046 - DNA, 110 bp, synthetic construct
  source 1..110: mol_type = other DNA
ttttttttcttttaaacttggtgttggtgagagagaaaataataaccaaatacatgataagctctaaaggggcttcagactcacagaagggaaatttgctcaagaatctc

SEQ ID NO: 75047 - DNA, 110 bp, synthetic construct
  source 1..110: mol_type = other DNA
atcaaggacagtgtttatcttccttttagaattcttccagttgtttacttcttttcataaatcatacagatagctacaatggccaagatagaactaaatatattttcctc

SEQ ID NO: 75048 - DNA, 110 bp, synthetic construct
  source 1..110: mol_type = other DNA
tctagggcagctggatgctgcaaaattccaacagcttttcttctggatctgtctcactaccagtcacaaaaatagtttcttaagctatatttttacccatggttcaaaca

SEQ ID NO: 75049 - DNA, 110 bp, synthetic construct
  source 1..110: mol_type = other DNA
ccttctaagcactgtttttcctgtaccccacatactttgatttttaaaacaatttttaatgagctcaaaatgtttaaaattttttcttgagacttcttctggagctgtgt

SEQ ID NO: 75050 - DNA, 110 bp, synthetic construct
  source 1..110: mol_type = other DNA
catgaattcatagatcagttcaggtatttttttagttattcaaggggctgtgacccataggatgaaaactgctgaactctcttaataaatgggtgattctattactatca

SEQ ID NO: 75051 - DNA, 110 bp, synthetic construct
  source 1..110: mol_type = other DNA
tgaatgcccccaaagcttgagagaggatggtctggagcaagtagtggctagtggctggccagagctgactacccactgtgaggcaagagccaagccaacaagctaggtag

SEQ ID NO: 75052 - DNA, 110 bp, synthetic construct
  source 1..110: mol_type = other DNA
tttcctcactcttctattatcatatgagtttttaatcttctctaaaaagaatgcctcggttatacacaaaagctagtcaacctttgtaccaattacatgttttgcagaaa

SEQ ID NO: 75053 - DNA, 110 bp, synthetic construct
  source 1..110: mol_type = other DNA
atccccagatctccccgctgctcaagccaagaccttaatggagctcattctctcaagtcccatgtccacaccatcagcaaaactgccagtgctcccttggaacatgtgag

SEQ ID NO: 75054 - DNA, 110 bp, synthetic construct
  source 1..110: mol_type = other DNA
tgagatgactttagccatggagcccctgagagctggcagagaggaaaatgtgagtgggaggaaggtcgtgggaggggtccagggtcgggattgctgggtgccaggagaga

SEQ ID NO: 75055 - DNA, 110 bp, synthetic construct
  source 1..110: mol_type = other DNA
cacagaccttgccttatgcccaaaatctctttcagttcccgttgttcctgtggaggctccatctagaccttcatatgcagccccttccacctctttttttttggctgccc

SEQ ID NO: 75056 - DNA, 110 bp, synthetic construct
  source 1..110: mol_type = other DNA
gctccatctagaccttcatatgcagccccttccacctctttttttttggctgccctgaggcccatggagtttccaggccacagatcagatctgagcaccagtcgcaacct

SEQ ID NO: 75057 - DNA, 110 bp, synthetic construct
  source 1..110: mol_type = other DNA
taagaagtttgcaagggagagatgagggcactgctttatttatttttccttcattttttaaagctttattgaaacgtagttgatttgcaatgttgtgacaatttctgctg

SEQ ID NO: 75058 - DNA, 110 bp, synthetic construct
  source 1..110: mol_type = other DNA
agagtttattcagtggagccaatttatttggcttcagagttaatgtagctcctttgactattccttggtgggtctatgcctcggggacatctccagggagatcccagaaa

SEQ ID NO: 75059 - DNA, 110 bp, synthetic construct
  source 1..110: mol_type = other DNA
tgtgaattttatgtcctgagatatgatggtatttactttttttaaaaaaagtccacctctattgcagaaataggtgtacagtaagtatttactctctacagtactagtaa

SEQ ID NO: 75060 - DNA, 110 bp, synthetic construct
  source 1..110: mol_type = other DNA
agaaaaagaccaaataaattttggtcctcaaaatatttctcctgtaaggacctgcttttgttacctttcaaatgaagtcagagaaacttacagtcctttactgctcacag

SEQ ID NO: 75061 - DNA, 110 bp, synthetic construct
  source 1..110: mol_type = other DNA
gtaacttggaatgctcatgctttacccacgttctttgtatcccttgaagcacatggtcaggggccacatcttccttcttccttccttccttccttccttttcctaatttc

SEQ ID NO: 75062 - DNA, 110 bp, synthetic construct
  source 1..110: mol_type = other DNA
atattttcagacctcagttgatggcaggtaagttgaggaaagcaacactgtggatgggagtaggggctcatgtatatcttacatatttatttgtgcataaataatcttat

SEQ ID NO: 75063 - DNA, 110 bp, synthetic construct
  source 1..110: mol_type = other DNA
acacttatcaccttgtcaactcacttatcagttctgcctccctctgagcgcctctagggcaaagctgtttattattcctctccgtctctagacttagctcaacgtctagc

SEQ ID NO: 75064 - DNA, 110 bp, synthetic construct
  source 1..110: mol_type = other DNA
agggcaaagctgtttattattcctctccgtctctagacttagctcaacgtctagcacgtagaaagtacagtaaaggctggttgaaatcaaataagtcaggttacataggt

SEQ ID NO: 75065 - DNA, 110 bp, synthetic construct; identical to SEQ ID NO: 75063
  source 1..110: mol_type = other DNA

SEQ ID NO: 75066 - DNA, 110 bp, synthetic construct; identical to SEQ ID NO: 75064
  source 1..110: mol_type = other DNA

SEQ ID NO: 75067 - DNA, 110 bp, synthetic construct
  source 1..110: mol_type = other DNA
atgtttgcaacagcctcgagtagaccaagccccagggtggccactgtccagaagctggacagcacggccaccagctcagtaactgaatcgtgacgaatgaccaggtggtc

SEQ ID NO: 75068 - DNA, 110 bp, synthetic construct
  source 1..110: mol_type = other DNA
aacacctgggcttcagtgtacttatgcacgaaggcatttttgtacatacttatctttctgccagggtcaccccctctcctctcttctctctctcccctgcctggggaatt

SEQ ID NO: 75069 - DNA, 110 bp, synthetic construct
  source 1..110: mol_type = other DNA
ttgcagcagtggtgaccgtggtgatattaccccatccgcgagcggattcctgatggtaccggcgggagagatcatcttcacaagtcatgaccttggggagatgagagaag

SEQ ID NO: 75070 - DNA, 110 bp, synthetic construct
  source 1..110: mol_type = other DNA
tagcaggaaatcctcaacagggacattagagatggttaaagacccacccagcttccagggcatcctcacgggttccaacctgtacatgtggatcccagtttgtcccctgt

SEQ ID NO: 75071 - DNA, 110 bp, synthetic construct
  source 1..110: mol_type = other DNA
cagggcatcctcacgggttccaacctgtacatgtggatcccagtttgtcccctgtctcctccactccctattcatccatccttttcaattgcctgtcctgcaaaagtcaa

SEQ ID NO: 75072 - DNA, 110 bp, synthetic construct
  source 1..110: mol_type = other DNA
aagacatctgttcactgaagcacctgaagatctactccatggccagacctaggatggccaatatactgaaaaagcaaagttatggcttagttgacattttgaaaagttac

SEQ ID NO: 75073 - DNA, 110 bp, synthetic construct
  source 1..110: mol_type = other DNA
ggccaatatactgaaaaagcaaagttatggcttagttgacattttgaaaagttacaaaaagaaatctgaaacttaacttccagtggcatcctccacttaactaagatgtc

SEQ ID NO: 75074 - DNA, 110 bp, synthetic construct
  source 1..110: mol_type = other DNA
ttgtgaagcactactttccacgtcgtttcatcacaaattgcaacttacttaacagaccaaaataacgatggtactgcagtacatcaaatactccacacactgtgctttca

SEQ ID NO: 75075 - DNA, 110 bp, synthetic construct; identical to SEQ ID NO: 75074
  source 1..110: mol_type = other DNA

SEQ ID NO: 75076 - DNA, 110 bp, synthetic construct
  source 1..110: mol_type = other DNA
acatacaagaaataaaattcataaggcccattccactatcacaatcctttttagcatgttggttgcagcttaatgtccgaaatcttagttcattgtagctaattttatgt

SEQ ID NO: 75077 - DNA, 110 bp, synthetic construct
  source 1..110: mol_type = other DNA
ctagcccagcaacctgcaaagctttcaatacgcacctcaagctgagaaggaagcggtgtagacagcacaatcagggccagatacagcatcatgtcaaagcaagctcatta

SEQ ID NO: 75078 - DNA, 110 bp, synthetic construct
  source 1..110: mol_type = other DNA
aacatttgagaacacagagctggtgtagtgcaggtgcacaactggaccaagaaatactagccaacacaataaaacaagaataagaaataatactcggtaatgaaaaggaa

SEQ ID NO: 75079 - DNA, 110 bp, synthetic construct
  source 1..110: mol_type = other DNA
cccagatgccccgggtccggccagcgcctgtgtggagacccagtcactctgcccgagcttgtggcctgaagagccttgagcctgtcacatgcatggtctggagccgctga

SEQ ID NO: 75080 - DNA, 110 bp, synthetic construct
  source 1..110: mol_type = other DNA
agcttgtggcctgaagagccttgagcctgtcacatgcatggtctggagccgctgaggtcgttgtaagctggtgatctcatctgtggtcaaggagaacgagtacccactcc

SEQ ID NO: 75081 - DNA, 110 bp, synthetic construct; identical to SEQ ID NO: 75079
  source 1..110: mol_type = other DNA

SEQ ID NO: 75082 - DNA, 110 bp, synthetic construct; identical to SEQ ID NO: 75080
  source 1..110: mol_type = other DNA

SEQ ID NO: 75083 - DNA, 110 bp, synthetic construct
  source 1..110: mol_type = other DNA
cagaggcaggaagcacaagcaggccttgtggattctgagacaggccaggtcaccgggagcaggaggccctgagctgagccccgggactgggcgctctggcctggaactga

SEQ ID NO: 75084 - DNA, 110 bp, synthetic construct
  source 1..110: mol_type = other DNA
gcatatacctccgatcaattacacattattctgtaaagctttactcattatcccccatttgcgtgaaagtgaatgtcctcggcaggccagaagcaggatatggctgggga

SEQ ID NO: 75085 - DNA, 110 bp, synthetic construct
  source 1..110: mol_type = other DNA
catttgcgtgaaagtgaatgtcctcggcaggccagaagcaggatatggctggggaattcaccaaaaagaattgattcaaagccatgcttaccaactatgccccttattgg

SEQ ID NO: 75086 - DNA, 110 bp, synthetic construct
  source 1..110: mol_type = other DNA
gtgccggcctgtctgcggtaaataaatcccgctacctcctctctgctgggacaaaacagctgggagacctcactttcagggaggagccaaagcaaataaggcctcaggag

SEQ ID NO: 75087 - DNA, 110 bp, synthetic construct
  source 1..110: mol_type = other DNA
tgcgtcccagtgctcccaagatgctgccgatcccattgcgccacatcgggaactcctaaatccactttttaatgcagaaatactttcgttcctggcaggacagcaggcca

SEQ ID NO: 75088 - DNA, 110 bp, synthetic construct
  source 1..110: mol_type = other DNA
ctaaatccactttttaatgcagaaatactttcgttcctggcaggacagcaggccaggaggtgagggacctggattcccatctggtctctgccacgaacccagtcccatcc

SEQ ID NO: 75089 - DNA, 110 bp, synthetic construct; identical to SEQ ID NO: 75087
  source 1..110: mol_type = other DNA

SEQ ID NO: 75090 - DNA, 110 bp, synthetic construct; identical to SEQ ID NO: 75088
  source 1..110: mol_type = other DNA

SEQ ID NO: 75091 - DNA, 110 bp, synthetic construct
  source 1..110: mol_type = other DNA
ccttcttgtatgtggggactgtgtgtgctttgcttttccttggccatgttgccataagcaccatccggccaagtctgatttaatactgcatggctcagcagccttccttc

SEQ ID NO: 75092 - DNA, 110 bp, synthetic construct
  source 1..110: mol_type = other DNA
aagcaccatccggccaagtctgatttaatactgcatggctcagcagccttccttcccaaaagacccttttggtcctctttctctcagttaatcttgactttcaccagctg

SEQ ID NO: 75093 - DNA, 110 bp, synthetic construct
  source 1..110: mol_type = other DNA
gggctgagagatgctgcttcctgtgagcagctgtgacatttaacacgaagaggaaggagaccaggcaaagacaagtctgagtacaaggtcaggtgtctccgacgtcttca

SEQ ID NO: 75094 - DNA, 110 bp, synthetic construct
  source 1..110: mol_type = other DNA
agcacgggtggggacagtccacttaggatgtggagtgtagaacctctaaggaagggccacgcgggtagtggaggagccaggggtgaggtggggagatggttggcatcctc

SEQ ID NO: 75095 - DNA, 110 bp, synthetic construct
  source 1..110: mol_type = other DNA
tcctggcccaaaggatttcccagagcccagagtccgcttgccctgtgaaggtctgcagagaacagtggacacgccatgtgcctgtaaaccagcagccgctacacgcagga

SEQ ID NO: 75096 - DNA, 110 bp, synthetic construct
  source 1..110: mol_type = other DNA
ggatggcgaggcagtggcttcttttccttctttgctcagacttggaaaagctgctccgggctgactcttagggaagcaccaaaacctcaggagaaaggcagttcctgcac

SEQ ID NO: 75097 - DNA, 110 bp, synthetic construct
  source 1..110: mol_type = other DNA
tagaaactagattagacttgagatcacttctaactaagtctgctatgcatttcccaagccataatattgccatgtaccttgactatgcctagtgaatatgaactgatggt

SEQ ID NO: 75098 - DNA, 110 bp, synthetic construct
  source 1..110: mol_type = other DNA
aagccataatattgccatgtaccttgactatgcctagtgaatatgaactgatggtgaaggtgaatgcagttagcagcaagtgatctctgtgtctgtctgtccactgtcct

SEQ ID NO: 75099 - DNA, 110 bp, synthetic construct
  source 1..110: mol_type = other DNA
aaggcaaaaagacaaaaaaaaaaaaaaaaagaaagtcagaactcctggttctgcttctgggcttttaaactcatcttgttatccttcctgggcatttgatgaaccatccc

SEQ ID NO: 75100 - DNA, 110 bp, synthetic construct
  source 1..110: mol_type = other DNA
ttctctgtaccctctcccacttgaaaaccatcacctcctcttctcctgcccaaatccttgctgatgaaactcaagcccccgttattccatgaaatcttctcccactctaa

SEQ ID NO: 75101 - DNA, 110 bp, synthetic construct
  source 1..110: mol_type = other DNA
ccttgctgatgaaactcaagcccccgttattccatgaaatcttctcccactctaagctcacagtgttttcttgcttcttctgctctctttgacacattaattatcttgaa

SEQ ID NO: 75102 - DNA, 110 bp, synthetic construct
  source 1..110: mol_type = other DNA
ggatcaagaaaatgtgggacagagctcccattggggctcagtggattacaaactccaccaatatctctgaggatgggggttcgatctctggcctggctcagtggattaag

SEQ ID NO: 75103 - DNA, 110 bp, synthetic construct
  source 1..110: mol_type = other DNA
tcccattggggctcagtggattacaaactccaccaatatctctgaggatgggggttcgatctctggcctggctcagtggattaaggatctgatattgctgtgagttgtgg

SEQ ID NO: 75104 - DNA, 110 bp, synthetic construct
  source 1..110: mol_type = other DNA
gcatctgtaactctcccccattctctccttgagcaactccttccagaggggtcaaagggtgggttctggcagagcacctgggccaagtcatgttctaaaactgcacacag

SEQ ID NO: 75105 - DNA, 110 bp, synthetic construct
  source 1..110: mol_type = other DNA
agggtgggttctggcagagcacctgggccaagtcatgttctaaaactgcacacagagttcagaagagtcacctgatgtctgcactgtttacagcaccacacagactaaat

SEQ ID NO: 75106 - DNA, 110 bp, synthetic construct
  source 1..110: mol_type = other DNA
atgtacaaaataggtgaaggggattaaaaggtacagttttacgggtataaactaaaagttagggggatgtattgtacacgtagggaataccatcagtaatattgtaacaa

SEQ ID NO: 75107 - DNA, 110 bp, synthetic construct
  source 1..110: mol_type = other DNA
aagttagggggatgtattgtacacgtagggaataccatcagtaatattgtaacaactttggtgatgggtgaaaactggtcttatcgtggtggccatttcataatgttgaa

SEQ ID NO: 75108 - DNA, 110 bp, synthetic construct
  source 1..110: mol_type = other DNA
attctagaagaaatattttcattgtgttggccatacatactaccaaactccagtgccagctcactctagcaaaatgtgaaggaaatgagacagaatctacaggaggtgtg

SEQ ID NO: 75109 - DNA, 110 bp, synthetic construct
  source 1..110: mol_type = other DNA
ccagctcactctagcaaaatgtgaaggaaatgagacagaatctacaggaggtgtgttctgattggttatccaacttttagcatgtgtgtgtgtgtgtgtgttgctaggcc

SEQ ID NO: 75110 - DNA, 110 bp, synthetic construct
  source 1..110: mol_type = other DNA
ttgcatcccagcaccaccactagaagctcgtaaacactcctccgcccctgaagctgtctccgcattgcagcagtaccgtcctaccgcacctccacgcgcagctttcagag

SEQ ID NO: 75111 - DNA, 110 bp, synthetic construct
  source 1..110: mol_type = other DNA
gtctccgcattgcagcagtaccgtcctaccgcacctccacgcgcagctttcagagctggtttctgcactgcggggcctgcctcgccaaatctccctgcccccgcctgtct

SEQ ID NO: 75112 - DNA, 110 bp, synthetic construct
  source 1..110: mol_type = other DNA
gagctattcaaagagcagtcatgtgggtgcactgtgccctgggccctcacacaacaattagggacgcagagctctggtcaggccaacctaagtgcagtcaggtggctttc

SEQ ID NO: 75113 - DNA, 110 bp, synthetic construct
  source 1..110: mol_type = other DNA
ctcccaggtaacatttataaacacacacacacacattcactcacctcctcgttctgataagcagtcacagctatgaactgggtttcggggaaggagcagttcatcaccat

SEQ ID NO: 75114 - DNA, 110 bp, synthetic construct
  source 1..110: mol_type = other DNA
gataagcagtcacagctatgaactgggtttcggggaaggagcagttcatcaccattcgatgggcacctccaacacgcactatgtgaacctggggttcatatttatgcaga

SEQ ID NO: 75115 - DNA, 110 bp, synthetic construct
  source 1..110: mol_type = other DNA
atggtatgtgtgagtggaaacaatgccggtgtcgggtcagaggcctccagcctatctcagcactgggccaccctgcagctgacatgggctacattctgccaggcatcagg

SEQ ID NO: 75116 - DNA, 110 bp, synthetic construct
  source 1..110: mol_type = other DNA
atgaatcaactgtggcatattcattcaataaaattctatacagtagtaaaaatgaattgtggtaggtcggctgataaactgttcacaatcactccctgccctgtttccac

SEQ ID NO: 75117 - DNA, 110 bp, synthetic construct
  source 1..110: mol_type = other DNA
attgtggtaggtcggctgataaactgttcacaatcactccctgccctgtttccacaacactctgcaatgttcctttgctgcttccctcaagtctggaatggccttggcaa

SEQ ID NO: 75118 - DNA, 110 bp, synthetic construct
  source 1..110: mol_type = other DNA
tagtttcagcaaaagtcttcttgttcagggtgggccctgcattgggataggaacgtaaggtacactagctcaaaatgaacccagtgaattgaagggaaaaggaatagctt

SEQ ID NO: 75119 - DNA, 110 bp, synthetic construct
  source 1..110: mol_type = other DNA
catctggcgtgtgttccacctctcacacttcaggaggatctgtgtcctgagcattacagccttcttctggttatcagctatggcatcaagccataggtgccctcagacca

SEQ ID NO: 75120 - DNA, 110 bp, synthetic construct
  source 1..110: mol_type = other DNA
ttgactgggggaataaatctgcctccagtgtggccatttcattaacccaacgggcagatttttttctcacttgacctgacccgtgtataattatatcccactcaaacaat

SEQ ID NO: 75121 - DNA, 110 bp, synthetic construct
  source 1..110: mol_type = other DNA
agatttttttctcacttgacctgacccgtgtataattatatcccactcaaacaatactgattcccttttgtacagtaacaagtgactatagatttacctgggagctactc

SEQ ID NO: 75122 - DNA, 110 bp, synthetic construct
  source 1..110: mol_type = other DNA
ccatgtttcttaaagacacatacttcagagctggcagcattagggtctttaggcccaagataaaaatcctgtttgttattgctgtgagtttagtaaattagtataatcaa

SEQ ID NO: 75123 - DNA, 110 bp, synthetic construct
  source 1..110: mol_type = other DNA
aaaatgtggaacttgggcaaataaatcacatttacctttggaatcctcaagacttttgctgcaatggtattttttttggattgttctcttttacatttgtcttcagagct

SEQ ID NO: 75124 - DNA, 110 bp, synthetic construct
  source 1..110: mol_type = other DNA
tcctgtgtagactctgtaggaatgtaaatcagggtgacttgggctgctgtaagcgaggagtagggacacataaccaaagctgggccaacaacccccatccctacctagga

SEQ ID NO: 75125 - DNA, 110 bp, synthetic construct
  source 1..110: mol_type = other DNA
aaatgagagctggaaaggtcagctgcagaaattcttcggcaggatcaggtcctcctgttgtagaagtgcagctaagagaaaatgggaaggtttttttgttttgttttgtt

SEQ ID NO: 75126 - DNA, 110 bp, synthetic construct
  source 1..110: mol_type = other DNA
cccccagtgagaaggatttccatggtgtccacctggaaggcacctcggtaaccaaaaacaataacccctggcctccccagactcctggctcttaacctctaagacctttc

SEQ ID NO: 75127 - DNA, 110 bp, synthetic construct
  source 1..110: mol_type = other DNA
gaaacttagtagtgtgtgtagaacaggaaaagaagtaagaaaaagcaaagtgaagagatgtaagggtcaagttcaaggttagattttgaagacatttttgccccatttta

SEQ ID NO: 75128 - DNA, 110 bp, synthetic construct
  source 1..110: mol_type = other DNA
ttagatttccagagctttgtttctaagttaaaaatcagagaaactggaagctacggtcagaagccactgatcaatgaagggtcagaggtgaagagatcaagggtgagagt

SEQ ID NO: 75129 - DNA, 110 bp, synthetic construct
  source 1..110: mol_type = other DNA
actttcttcccacctccacctctgatttccataatactaaattaagctactcacatgacgttatttcaaagcaccctacactattttttgtttctctttttggtactttt

SEQ ID NO: 75130 - DNA, 110 bp, synthetic construct; identical to SEQ ID NO: 75129
  source 1..110: mol_type = other DNA

SEQ ID NO: 75131 - DNA, 110 bp, synthetic construct
  source 1..110: mol_type = other DNA
ttaccactgagccacaacgagaactcccagtggcaggctttcatggcctttctgctttcagctagacttaaggaaatctctgtgagaggtgggaaagaaccatgggaggc

SEQ ID NO: 75132 - DNA, 110 bp, synthetic construct
  source 1..110: mol_type = other DNA
gggagtgatttgcctctgtaccaaaagcaagagggcttcggaagcctagctctcgtccaaacagaagtcaacaccttcctatcatcaacaaaagccagcatatcaaggaa

SEQ ID NO: 75133 - DNA, 110 bp, synthetic construct
  source 1..110: mol_type = other DNA
agccatatcattggcatgatcagcatccacataaaaggagataaaattccatatgtcaagttggtcaacatggtccctggacacaccacactggaatataaaccctggga

SEQ ID NO: 75134 - DNA, 110 bp, synthetic construct
  source 1..110: mol_type = other DNA
atgaccaagttctccacagcctacctccttaatacatctctgaaatgtatgccctttcttcttcagctccatgatactgtcttagtccccaggttcttactgttcacctg

SEQ ID NO: 75135 - DNA, 110 bp, synthetic construct
  source 1..110: mol_type = other DNA
ttggcttttatatagtgtgtgtatacgtgaaaatgttactttagaaatgacatgacaatcctcttattggtggttctagcagccctgagaagtaggggagaatgcttgct

SEQ ID NO: 75136 - DNA, 110 bp, synthetic construct; identical to SEQ ID NO: 75135
  source 1..110: mol_type = other DNA

SEQ ID NO: 75137 - DNA, 110 bp, synthetic construct; identical to SEQ ID NO: 75135
  source 1..110: mol_type = other DNA

SEQ ID NO: 75138 - DNA, 110 bp, synthetic construct; identical to SEQ ID NO: 75135
  source 1..110: mol_type = other DNA

SEQ ID NO: 75139 - DNA, 110 bp, synthetic construct
  source 1..110: mol_type = other DNA
tccagaagaaaggtgtcatggccccgatatccagggcatgtgtggtcacagccatgatgtggttcaaaagtcgtgtgatttctccaaagagcactgcagcaaggtgaaga

SEQ ID NO: 75140 - DNA, 110 bp, synthetic construct
  source 1..110: mol_type = other DNA
gatgtggttcaaaagtcgtgtgatttctccaaagagcactgcagcaaggtgaagacaagaagagaaggatatgggagccaaggatccaggctgacagagtcattctgggc

SEQ ID NO: 75141 - DNA, 110 bp, synthetic construct
  source 1..110: mol_type = other DNA
cctactgccaaccacacagctccccacggttcacaatgactcctctttaatcatgaaagtgtatcttgcccaccttaatcacaaaaccgaatcagaggggttgtattctc

SEQ ID NO: 75142 - DNA, 110 bp, synthetic construct
  source 1..110: mol_type = other DNA
aaagtgtatcttgcccaccttaatcacaaaaccgaatcagaggggttgtattctccccaccctcagctcctcactgcttttagagggatgtggggggactaactccagta

SEQ ID NO: 75143 - DNA, 110 bp, synthetic construct
  source 1..110: mol_type = other DNA
cagacaaaggttctgtccagtcacctgctggtagaggcttctggatggaggcaacccctcatggcccccttttatcctgctctaagcagagctcacagctgttatgtgtg

SEQ ID NO: 75144 - DNA, 110 bp, synthetic construct
  source 1..110: mol_type = other DNA
ccctcatggcccccttttatcctgctctaagcagagctcacagctgttatgtgtgcctgggaccacaaagtggggtatccaagtgcccatggccatatttccatcttggg

SEQ ID NO: 75145 - DNA, 110 bp, synthetic construct
  source 1..110: mol_type = other DNA
gttccttcctttgatccctccctcacagagcaatagtgggaggaacaaaccatgtcacagcagctttgccaagagtgaactaaacttaactcggaaggtggttcttttcc

SEQ ID NO: 75146 - DNA, 110 bp, synthetic construct
  source 1..110: mol_type = other DNA
ctgcccagcagcaagatgagcagcttgaaagccacggagatgaagaggccctcacaggctgtcccgcatggctccagctcctcccgccacagcagcgggggcagcagcag

SEQ ID NO: 75147 - DNA, 110 bp, synthetic construct
  source 1..110: mol_type = other DNA
agctccctgttaccactctggccagagctgtctctgaagacgccctaggttcttggagcaaagccaaaggtatgagtggcagctccggtaactcaaatttccaatgccag

SEQ ID NO: 75148 - DNA, 110 bp, synthetic construct
  source 1..110: mol_type = other DNA
acctcggtgtgttttcatttctcctgcgtgaaaccttgtcagcgttggaggaggatagctctggggaaacgtttgccggtggctttgggagcgaggttgaggactagggc

SEQ ID NO: 75149 - DNA, 110 bp, synthetic construct
  source 1..110: mol_type = other DNA
tctctctccccatggccgtttaactagatgtgaactttgaccttcattccctttgatagctaagtacagataaaatttctattttgtttgttaggataagaccgtaagtc

SEQ ID NO: 75150 - DNA, 110 bp, synthetic construct
  source 1..110: mol_type = other DNA
ggtcctgggttattctttagaggaaatttgttataagtctattcagattttctcttccttcctaagtcaattttgacagcttgtgtctttctggaaatttggctacttta

SEQ ID NO: 75151 - DNA, 110 bp, synthetic construct
  source 1..110: mol_type = other DNA
tgcaaaacattcttttgagtggccagtccaaaaatgagaggagagctttgaaatggccaaggatgggggtcatattttggctgcgaaaaggcactgacacaatatagatg

SEQ ID NO: 75152 - DNA, 110 bp, synthetic construct
  source 1..110: mol_type = other DNA
gaaactccaaaatgagatgattactgactcagagtcttttatttccagatataccattctcagaggctaccaacagagatccaacagcagctactgcagcttccagcagt

SEQ ID NO: 75153 - DNA, 110 bp, synthetic construct
  source 1..110: mol_type = other DNA
tcctttccttttctgagtcctgctacacttttgtcatcatccctcagctgcttgttcatcttctctcagccaccaagactatttccttcgtggcctgtgccacccagctc

SEQ ID NO: 75154 - DNA, 110 bp, synthetic construct
  source 1..110: mol_type = other DNA
tcatcttctctcagccaccaagactatttccttcgtggcctgtgccacccagctcttcttcttccttggctttgcctgtaccaactgctttctcattgctgtgatgggat

SEQ ID NO: 75155 - DNA, 110 bp, synthetic construct
  source 1..110: mol_type = other DNA
caacaacacccagaggtgacaagcgcagctccctgtaaagaacaagacagacccatcccttgccttccgggacctccctctgagaccaacacaccaacatgggtagcaac

SEQ ID NO: 75156 - DNA, 110 bp, synthetic construct
  source 1..110: mol_type = other DNA
catcccaaggggctctgccaaaacactccacattcttccctttgcccaccttatattgtagggcatgcacagagttaattccttcctgaatccatcttgttcttctgcag

SEQ ID NO: 75157 - DNA, 110 bp, synthetic construct
  source 1..110: mol_type = other DNA
tgtgaggtgagcatattcattaggaaagtcccctaggagggtgtgaaaattaaagtgaatcttgaaagatggcaaggcagaattaattattccaggcagcagaaaaacat

SEQ ID NO: 75158 - DNA, 110 bp, synthetic construct
  source 1..110: mol_type = other DNA
aagttctcaggccagggatcaaacctgagctgcagcaggagacccaagccaccacaatgacaacatcacatcctcaaaccactgtgccacaaagcaactctcaaatttct

SEQ ID NO: 75159 - DNA, 110 bp, synthetic construct
  source 1..110: mol_type = other DNA
tagccagacttcttgcagggtggctgaaggctcccagaacaagcatcccaagacatttgcaaaagctgcatcaccctttttgaactagcctcagaggtcgcattgtgcca

SEQ ID NO: 75160 - DNA, 110 bp, synthetic construct
  source 1..110: mol_type = other DNA
cagctgaatcctatccctcgctggggaccagctcctgattaataccaacattatccctgaacactctcccctcctggcctccctgtcattaattacctcctcgcccagcc

SEQ ID NO: 75161 - DNA, 110 bp, synthetic construct
  source 1..110: mol_type = other DNA
gccctgagttcaaagaaaactaccaagaagtccccccacccctcattcccctaagccaggctaagtgactgggtccagctccgtgatcgggcactttatctttggcaccc

SEQ ID NO: 75162 - DNA, 110 bp, synthetic construct
  source 1..110: mol_type = other DNA
ccaggctaagtgactgggtccagctccgtgatcgggcactttatctttggcacccactgccctgggcccacggaagacacagggcttgggaagagacatgggaacccatg

SEQ ID NO: 75163 - DNA, 110 bp, synthetic construct
  source 1..110: mol_type = other DNA
tttgccctccttggtttatcaaacttggcagtcaggaagtccctggtgcctctgacttgtccctgactcatcaggctttggtgttatggtgtctgtttgctttcccaagg

SEQ ID NO: 75164 - DNA, 110 bp, synthetic construct
  source 1..110: mol_type = other DNA
cttgtccctgactcatcaggctttggtgttatggtgtctgtttgctttcccaaggaagtagaacgcaacctccaggatgccatgcaagtgtgccgcaatgttctcctgga

SEQ ID NO: 75165 - DNA, 110 bp, synthetic construct
  source 1..110: mol_type = other DNA
gttctgttggcttttacagcctctgcacttttgcagcttccagccctttcccattcaggtaacatctgtagacttgtctgtctccccaccaacactctgagggcaggact

SEQ ID NO: 75166 - DNA, 110 bp, synthetic construct
  source 1..110: mol_type = other DNA
gccccgccccccaccccgctggccgaccttgcagactctggccacccgggatgtgtggagcttctcgaagaactcgaactcgctggctgtctcctcgaagaagaagtaga

SEQ ID NO: 75167 - DNA, 110 bp, synthetic construct
  source 1..110: mol_type = other DNA
taatatcatttgagtgaggttctgtttgcttgtcatttcatttatgaagaatgaccaaggactatttccagctgtgtttgcaggcaggtaaagctaagaaggtggtggca

SEQ ID NO: 75168 - DNA, 110 bp, synthetic construct
  source 1..110: mol_type = other DNA
tcctttttgtacatacagtccctatcaaagccaaagcctattaaagctgaagtctatagcctttttgacattgtgatgtagtcttgagctccagaagtaaaggaagtaaa

SEQ ID NO: 75169 - DNA, 110 bp, synthetic construct
  source 1..110: mol_type = other DNA
gaaaaaaagcaagatgcgaaacagtgtgtagagaatgctatatttgtacaaaaatgggccacattgtgactctttgctcaggtattcaaccactcagcatgtatttatgg

SEQ ID NO: 75170 - DNA, 110 bp, synthetic construct
  source 1..110: mol_type = other DNA
aaaagagcatgtgctgtgctttcatgatttcctgtgtgtccttgggcaagtgacgccatgtctctgtgcttccagctgcttacctataaaaatactctacaggatgttgt

SEQ ID NO: 75171 - DNA, 110 bp, synthetic construct
  source 1..110: mol_type = other DNA
ggctctcctaatacccagccctgcccctcactgccctggcctgagcaaggaaggaagggaagggaaatctagggatacagagaattactcactgggagaaggggacctgg

SEQ ID NO: 75172 - DNA, 110 bp, synthetic construct
  source 1..110: mol_type = other DNA
ccccattatctgcactgctgagcagggcgtggtacatggagggcatttgtctgggatgtggccttccctggaatagagtatggtcaagccccacctgaactctgcaacag

SEQ ID NO: 75173 - DNA, 110 bp, synthetic construct
  source 1..110: mol_type = other DNA
atgtggccttccctggaatagagtatggtcaagccccacctgaactctgcaacaggtagaggttcaaaattcctgaaccaacattccaggctgtgttatgaaaaacactg

SEQ ID NO: 75174 - DNA, 110 bp, synthetic construct
  source 1..110: mol_type = other DNA
aggctatcatgagaaagtctgacactatttggtgacctgaagggagggaaataataaggtagaagcaatattttaaaagctaatggcggagtttcccgtcgtggcgcagt

SEQ ID NO: 75175 - DNA, 110 bp, synthetic construct
  source 1..110: mol_type = other DNA
agtctgacactatttggtgacctgaagggagggaaataataaggtagaagcaatattttaaaagctaatggcggagtttcccgtcgtggcgcagtggttaacgaatccga

SEQ ID NO: 75176 - DNA, 110 bp, synthetic construct
  source 1..110: mol_type = other DNA
aactcatgtcaatacttgatagccacatggtgctagtagctactgtgtgggacagggaaatctttggaacatcaagattgaggctggagttcctcttgtggctcagtgga

SEQ ID NO: 75177 - DNA, 110 bp, synthetic construct
  source 1..110: mol_type = other DNA
ttctggtggtctccacatcttgcacagtcccctgtcttctttcctctctggcacacagatgcttctttcccaccaagcctgtccctctcttcctctaagagatccaaccg

SEQ ID NO: 75178 - DNA, 110 bp, synthetic construct
  source 1..110: mol_type = other DNA
cattcacttcatcctccagagcatcctaatcaccactgcctaatcagttttagggtcatgtcagagagcactctaggtgttatgtagaccaacttctagctttctaaaat

SEQ ID NO: 75179 - DNA, 110 bp, synthetic construct
  source 1..110: mol_type = other DNA
tcatgtcagagagcactctaggtgttatgtagaccaacttctagctttctaaaatacgtccttcaaaaccattttcctgccatcacaagccacaaatatgatatagtttc

SEQ ID NO: 75180 - DNA, 110 bp, synthetic construct
  source 1..110: mol_type = other DNA
aaactaaatggtcccaggagactcaagctctgaagcataattaatgccagaggaaaggaattagcacataagtgactttatttataataagtaaaataagcataattaat

SEQ ID NO: 75181 - DNA, 110 bp, synthetic construct
  source 1..110: mol_type = other DNA
ggggctatgttccattgaggtaaagctcttttggatctaatataatagtttgtaactttcaacctggcaaatatgaccattctatagatatttcaaaacttccgaacttg

SEQ ID NO: 75182 - DNA, 110 bp, synthetic construct
  source 1..110: mol_type = other DNA
ttccctcctgtagggggacatgattgtatcactgaaaggtagaaatttctcccgaaagttcagaaataggaaaggtattctgaagctatacattgcagcctgaggaaggg

SEQ ID NO: 75183 - DNA, 110 bp, synthetic construct
  source 1..110: mol_type = other DNA
gggattccttcctctgcaagctcatggaccagtggagccagagcctgtggaaggccaaacggagtccgtgcttgaagctctccctcttcctcttaatagcctcactagcc

SEQ ID NO: 75184 - DNA, 110 bp, synthetic construct
  source 1..110: mol_type = other DNA
caaacggagtccgtgcttgaagctctccctcttcctcttaatagcctcactagcctattctccacccccacacctctgaaattcccaggtgccttcaggcacaaataagc

SEQ ID NO: 75185 - DNA, 110 bp, synthetic construct; identical to SEQ ID NO: 75183
  source 1..110: mol_type = other DNA

SEQ ID NO: 75186 - DNA, 110 bp, synthetic construct; identical to SEQ ID NO: 75184
  source 1..110: mol_type = other DNA

SEQ ID NO: 75187 - DNA, 110 bp, synthetic construct
  source 1..110: mol_type = other DNA
cggagcagaaatgggccagccctgtgatatcactgccagctcttaccaagtacggaattttagacagcatgtggggacagtggattagactgtgaattgtccatatttgc

SEQ ID NO: 75188 - DNA, 110 bp, synthetic construct
  source 1..110: mol_type = other DNA
gaggtgcggcctgagggtgacaggggtagaaggaaaatgcagggacaggcggaggggatggggcggtgagcagcccggatactcacacctccagaatgcggtcccccttg

SEQ ID NO: 75189 - DNA, 110 bp, synthetic construct
  source 1..110: mol_type = other DNA
gagcagggcagatctcttagcagtggagccgtcgggttagcactcctctctctcccccaccctcactcggtccagaagctcttgcgtagatcacttcccttctcttctca

SEQ ID NO: 75190 - DNA, 110 bp, synthetic construct
  source 1..110: mol_type = other DNA
cccaccctcactcggtccagaagctcttgcgtagatcacttcccttctcttctcagcccagattctggcatcccctccatccactagtccggggcttggaggttggagac

SEQ ID NO: 75191 - DNA, 110 bp, synthetic construct
  source 1..110: mol_type = other DNA
aaggggtaaatatacatagaatggaaatagataagagcctagagcagcacataggtggtcttgatatgtattccattctaaagctccttttctggtcatacagacatcat

SEQ ID NO: 75192 - DNA, 110 bp, synthetic construct
  source 1..110: mol_type = other DNA
catctaaacctgtgattcccggatccccgaggcttgttctgctgagcctcccttctgtgaagtgggagagcatcacggccacatgcaacacacctctttgaggctgagag

SEQ ID NO: 75193 - DNA, 110 bp, synthetic construct
  source 1..110: mol_type = other DNA
ggcagatccatggtctgtgggctgtaactccctgactctccacatgaaggactgtctgctgtccaaggctaagttgccttctctcctgaaccgtattcactttggcccta

SEQ ID NO: 75194 - DNA, 110 bp, synthetic construct
  source 1..110: mol_type = other DNA
ctgctgtccaaggctaagttgccttctctcctgaaccgtattcactttggccctatgtgagtttgccttgggttgctcctctttctctgcttctacagatgatcctcttc

SEQ ID NO: 75195 - DNA, 110 bp, synthetic construct
  source 1..110: mol_type = other DNA
ggatgttagcactgacccatggacagttaatgctttaattaaattgctaatatgtttaaaacttttcccttatgaaaatctttataattaagttaccagtaagaggggtg

SEQ ID NO: 75196 - DNA, 110 bp, synthetic construct
  source 1..110: mol_type = other DNA
attcctcgcctacaagtcaacaatttcacaatgttttctctttttaccccctaccttagctgataacctgacaccatattttactgagaatatggaggcaatcagacaag

SEQ ID NO: 75197 - DNA, 110 bp, synthetic construct
  source 1..110: mol_type = other DNA
tcagcatccctcccagccccactcctttctgggctctttgttctgtggctttgcagtcaataactaggccatgactggtttagaaatgatttggggaagagagattggca

SEQ ID NO: 75198 - DNA, 110 bp, synthetic construct
  source 1..110: mol_type = other DNA
cctatgtaccctcatctctttatccatgtgctggcgcttccttccctgaatccatatctatgtgctgatgatgtgcccctgtatctacgtcatggctgtgaccgtgcact

SEQ ID NO: 75199 - DNA, 110 bp, synthetic construct
  source 1..110: mol_type = other DNA
atctatgtgctgatgatgtgcccctgtatctacgtcatggctgtgaccgtgcacttcttgacttggtgtccatgcagtgagtccactctgcaccgctatgaggttcaccc

SEQ ID NO: 75200 - DNA, 110 bp, synthetic construct
  source 1..110: mol_type = other DNA
actattgggtatgaagaattctaccctgctcactaaaggtgaagacagaggaggacatctgccccttacctcagaccaaaggacaggactttgcagaaaccatctgcaga

SEQ ID NO: 75201 - DNA, 110 bp, synthetic construct
  source 1..110: mol_type = other DNA
ggttgccctgaccggctttgtcccctggacaagttcttgaacgccatgtcagtgtattccttaagcccagaaaaataccacacactctgctctgaagcacaggtgacggg

SEQ ID NO: 75202 - DNA, 110 bp, synthetic construct
  source 1..110: mol_type = other DNA
ggtaaagtcactggcccacaacagcttaatggcagccttgaggctagaatttgggtcttataattctcagttcagggctctttctgctacagcgaggtcctgtgatctct

SEQ ID NO: 75203 - DNA, 110 bp, synthetic construct
  source 1..110: mol_type = other DNA
tcttataattctcagttcagggctctttctgctacagcgaggtcctgtgatctcttctccctttcttcctcttagcactggatggactcagcctccttccctagaggtca

SEQ ID NO: 75204 - DNA, 110 bp, synthetic construct
  source 1..110: mol_type = other DNA
ccgcagctgccaggcttttctccaaagccaccttgatgagctgaaagaaaatcgtggtttaaagaagttaggtcacagaagaggatctaagaggaacctcagatcacaaa

SEQ ID NO: 75205 - DNA, 110 bp, synthetic construct
  source 1..110: mol_type = other DNA
gggtgaccttagatggtttatcaccctgggcctcagtctccctaactttaaagcgaagggtttattcagtaggaaaagctgagtaaatggtatataggaatagtctatgc

SEQ ID NO: 75206 - DNA, 110 bp, synthetic construct
  source 1..110: mol_type = other DNA
tttcttgtgatgaggacaatttttgtaactatttttttgtgactgccctctggcaatctccagtctgttctttatctatgagtttgttttggaggcaggatttcactctt

SEQ ID NO: 75207 - DNA, 110 bp, synthetic construct
  source 1..110: mol_type = other DNA
atctccagtctgttctttatctatgagtttgttttggaggcaggatttcactcttttttagagcctaaattctgttgcgtatatataccacatctatcccttcatctatt

SEQ ID NO: 75208 - DNA, 110 bp, synthetic construct
  source 1..110: mol_type = other DNA
gctggcagtgtcctgggggaagaatcttcacagaattctgtgctctgggtctctgcttgcaggggcaagtcttgtgtgaagagtgctgggggcatctggccctagattgg

SEQ ID NO: 75209 - DNA, 110 bp, synthetic construct
  source 1..110: mol_type = other DNA
cttgcaggggcaagtcttgtgtgaagagtgctgggggcatctggccctagattggttacagccttaagtagggcagaggggagtgaggaacgccttccgtcccaagtgca

SEQ ID NO: 75210 - DNA, 110 bp, synthetic construct
  source 1..110: mol_type = other DNA
tctttgttggaagacaccttggcagattatatgcagaggtgtcacttacacgctgctgaaatgagctgggctggaacacgccagccactcttcctcaacgtcgccaagtg

SEQ ID NO: 75211 - DNA, 110 bp, synthetic construct
  source 1..110: mol_type = other DNA
ctgaaatgagctgggctggaacacgccagccactcttcctcaacgtcgccaagtggttattttagatggagcattgaaagggcggtttttttcctggtgaatttgcagtg

SEQ ID NO: 75212 - DNA, 110 bp, synthetic construct
  source 1..110: mol_type = other DNA
tcatcaggtgctcacattctgtgcgccccttgcccataaaaatgcaaagacctcagtttagatggatcacgttggcattctcattcagcacttactttgtggcaataaag

SEQ ID NO: 75213 - DNA, 110 bp, synthetic construct
  source 1..110: mol_type = other DNA
tgtcttctggccaggctcccctttcaacatctttcctctcccctccagtgcccaaggcgggatcctctccttgtacctgttttactcttctgtggctgctcattaatgcc

SEQ ID NO: 75214 - DNA, 110 bp, synthetic construct
  source 1..110: mol_type = other DNA
tctcaaagtgttgggggctgttagaaacaatggcactgtgacgttggaacaacccttcccactggcttcctgtcgtctcactgagaacatgtgaagttaaggacagcttc

SEQ ID NO: 75215 - DNA, 110 bp, synthetic construct
  source 1..110: mol_type = other DNA
ttcccactggcttcctgtcgtctcactgagaacatgtgaagttaaggacagcttcttcccaggcaataagcatcccaggtgcccatatgcggagttatcttgtcttgtag

SEQ ID NO: 75216 - DNA, 110 bp, synthetic construct
  source 1..110: mol_type = other DNA
aggtgttttgctggcaacagccccaccccgatccttcccactgaagatgagtgggccctaagaacagtccttagcttgcagtgtgaagccatggttatgggctccccatt

SEQ ID NO: 75217 - DNA, 110 bp, synthetic construct
  source 1..110: mol_type = other DNA
ccctaagaacagtccttagcttgcagtgtgaagccatggttatgggctccccattagaagctgagaaggggtggcagtgctctgtgtaagaaaaggatggagagaggctc

SEQ ID NO: 75218 - DNA, 110 bp, synthetic construct; identical to SEQ ID NO: 75216
  source 1..110: mol_type = other DNA

SEQ ID NO: 75219 - DNA, 110 bp, synthetic construct; identical to SEQ ID NO: 75217
  source 1..110: mol_type = other DNA

SEQ ID NO: 75220 - DNA, 110 bp, synthetic construct
  source 1..110: mol_type = other DNA
ccttggaataaaggctaacatccttcatatggcttaaaggtctccccaatttggtctctcacctgctagcttttctcctgcttctctatccactgctcgctggagtcctt

SEQ ID NO: 75221 - DNA, 110 bp, synthetic construct
  source 1..110: mol_type = other DNA
cctaaatgacatattaaaaggatcatacattgtgatcaagtgggattatcccaaggatgcgaaaattcttcaacatctacctatcggtgtgataaaccacattaacaagc

SEQ ID NO: 75222 - DNA, 110 bp, synthetic construct
  source 1..110: mol_type = other DNA
aaaaggatcatacattgtgatcaagtgggattatcccaaggatgcgaaaattcttcaacatctacctatcggtgtgataaaccacattaacaagctgaagaataaaaacc

SEQ ID NO: 75223 - DNA, 110 bp, synthetic construct
  source 1..110: mol_type = other DNA
acttatttcacttcacatgatgtcctcaatgttcatccatactgctgcttccctgatttcgattctagaatcctaccttccattacttttagtgatgttttttagtaatg

SEQ ID NO: 75224 - DNA, 110 bp, synthetic construct
  source 1..110: mol_type = other DNA
aacctagctaaatattaagcagcaggccatgctcatcaataagtggaagatacgaagaacaccagattttgaaataatgttaattctaattaacagcaacaaatcaaagt

SEQ ID NO: 75225 - DNA, 110 bp, synthetic construct
  source 1..110: mol_type = other DNA
gggttcacaagggaaataggtgacctttttgacctttacgtttagagatgaccggaaaattctgaatctcccagggagagccttcagagggaaggatcatggtggagact

SEQ ID NO: 75226 - DNA, 110 bp, synthetic construct
  source 1..110: mol_type = other DNA
aaaattctgaatctcccagggagagccttcagagggaaggatcatggtggagactctcaagagggggcccagcccaatgctcaacctctccgtgctgtttccgcatctgt

SEQ ID NO: 75227 - DNA, 110 bp, synthetic construct
  source 1..110: mol_type = other DNA
agaggaataacaagtttccaaaattgtggagttttggggaccccagctatccatcactcctcacgcccacctagaaagtggctacagaaaagttgcagaaggagttccca

SEQ ID NO: 75228 - DNA, 110 bp, synthetic construct
  source 1..110: mol_type = other DNA
ttaccacctcttttctcccactagatcgaggccaccaccatctctcacctggactcttgcactggcctttaactgtttccctgctgccacgcggacccttatggtctatt

SEQ ID NO: 75229 - DNA, 110 bp, synthetic construct
  source 1..110: mol_type = other DNA
cttgcactggcctttaactgtttccctgctgccacgcggacccttatggtctattttcagcccattggcttgagcaatcctgttaaaaccttagtcagagtatgtcatgc

SEQ ID NO: 75230 - DNA, 110 bp, synthetic construct
  source 1..110: mol_type = other DNA
caatggaagcaaaatctacaggtaggatgactcttggcggccatggggggaaatgcacattttggcaggactggtgggcatgttttgggggagtgagattagatgggtga

SEQ ID NO: 75231 - DNA, 110 bp, synthetic construct
  source 1..110: mol_type = other DNA
ccatgggatctgtgttataattggatgttgcattcttgactgaagacttggcatcggataagtcagatactaaatatgtcattgaggcaaagattcagagtttaaatgag

SEQ ID NO: 75232 - DNA, 110 bp, synthetic construct
  source 1..110: mol_type = other DNA
ggataagtcagatactaaatatgtcattgaggcaaagattcagagtttaaatgagtagttctcaaccctggctgagcattagaattatcaaagaagatttaaaaaccaaa

SEQ ID NO: 75233 - DNA, 110 bp, synthetic construct
  source 1..110: mol_type = other DNA
tgttgcccaccaaaccactagttcctcccttcatggctggcagaaccctccttccatctgagtgtctcctactcttctgagtaactcaaagaaagctatatctcaactgg

SEQ ID NO: 75234 - DNA, 110 bp, synthetic construct
  source 1..110: mol_type = other DNA
atctgagtgtctcctactcttctgagtaactcaaagaaagctatatctcaactggtctaaaccaattactgtgactccatttctcttcgagtgactggtttcagcataga

SEQ ID NO: 75235 - DNA, 110 bp, synthetic construct; identical to SEQ ID NO: 75233
  source 1..110: mol_type = other DNA

SEQ ID NO: 75236 - DNA, 110 bp, synthetic construct; identical to SEQ ID NO: 75234
  source 1..110: mol_type = other DNA

SEQ ID NO: 75237 - DNA, 110 bp, synthetic construct
  source 1..110: mol_type = other DNA
atcgaggagcctgggaggagaaggagcaggtgctcggtgtggtttacaacagtcttattttacctgaatgctgaacccgggaaaaagagtgttgtataaacacagcgagt

SEQ ID NO: 75238 - DNA, 110 bp, synthetic construct
  source 1..110: mol_type = other DNA
ttctcatccttcaagcccgaaaccctaaaccagtgctgctcaaacctgaatgcgcagacaagccacccggggtgtggattaagtgcagatttgccggccccacccccaaa

SEQ ID NO: 75239 - DNA, 110 bp, synthetic construct
  source 1..110: mol_type = other DNA
gcccaggacctagtgcactgagagagaaccatcctcatctgtggcgtgcccacccatctcaagagcaaatccctagctctgtctgcccaccttgtttcccaggagcttct

SEQ ID NO: 75240 - DNA, 110 bp, synthetic construct
  source 1..110: mol_type = other DNA
ctggtttatggaactgggtcaggaaattgcttttcagagatgctggtactctattcatcaatgcatttggtcttccgggcccacttgagaacagacgtatgggcaggtca

SEQ ID NO: 75241 - DNA, 110 bp, synthetic construct
  source 1..110: mol_type = other DNA
catcaatgcatttggtcttccgggcccacttgagaacagacgtatgggcaggtcacctgttatccttcctccacggcatgtccatagccctaaggttttgcatcctttcc

SEQ ID NO: 75242 - DNA, 110 bp, synthetic construct
  source 1..110: mol_type = other DNA
tggatcaattcagacacttacactcaggccaatgagctctgctaaagaaaatcacatcacgggagttcccatcatggcgcagtggaaacgaatccgactaggaactatga

SEQ ID NO: 75243 - DNA, 110 bp, synthetic construct
  source 1..110: mol_type = other DNA
atctcctagccccttcctgcccctagatggcacctctctattagggtgacttagcattttctccaggattcattccaaatcctaggagaccctaagtccttcataatatt

SEQ ID NO: 75244 - DNA, 110 bp, synthetic construct
  source 1..110: mol_type = other DNA
attttctccaggattcattccaaatcctaggagaccctaagtccttcataatattccacaaagagggaatttcatcctgtctgtgacctggcaaacaggagccatcacag

SEQ ID NO: 75245 - DNA, 110 bp, synthetic construct
  source 1..110: mol_type = other DNA
tcccctacctgtaagagattatgatggcgtcaccttttgtcacgtgatttgcagtgccttcctgatttccagctcggctggcggcctgtgagcagaatgtgacctccctg

SEQ ID NO: 75246 - DNA, 110 bp, synthetic construct
  source 1..110: mol_type = other DNA
gccttcctgatttccagctcggctggcggcctgtgagcagaatgtgacctccctgccctttggcgtcttttacttttcccttttagtgagaagttagtgctgcagttggg

SEQ ID NO: 75247 - DNA, 110 bp, synthetic construct; identical to SEQ ID NO: 75245
  source 1..110: mol_type = other DNA

SEQ ID NO: 75248 - DNA, 110 bp, synthetic construct; identical to SEQ ID NO: 75246
  source 1..110: mol_type = other DNA

SEQ ID NO: 75249 - DNA, 110 bp, synthetic construct
  source 1..110: mol_type = other DNA
caaggtggtcatcccaagtacaaagctgattacatcacacctctgctttcacatatacaaccttaatggtttccagctgaactaagaatagcatttcaaatctcttaacg

SEQ ID NO: 75250 - DNA, 110 bp, synthetic construct
  source 1..110: mol_type = other DNA
ctcaataaaaatttcaattaagggagtgctaagttcactcccttacagacaataaaaacgataaagggagagttgggcaggccacctttcatccatagctgtaaaatcgg

SEQ ID NO: 75251 - DNA, 110 bp, synthetic construct
  source 1..110: mol_type = other DNA
aaacgataaagggagagttgggcaggccacctttcatccatagctgtaaaatcggttcacactattagtgggagggaaaattccactaccaatgcgacttccaaggaagc

SEQ ID NO: 75252 - DNA, 110 bp, synthetic construct
  source 1..110: mol_type = other DNA
gaatttagccagagctgtttgctcagattcttccccattatctgtccgtcttggatgtgagggtgtgcctttcctccaggcatagggagagcatctgtcacctcagagtc

SEQ ID NO: 75253 - DNA, 110 bp, synthetic construct
  source 1..110: mol_type = other DNA
tgtgagggtgtgcctttcctccaggcatagggagagcatctgtcacctcagagtcacatgcactgcttcagggatgaaaggcagggggacagagagaactcctgcttctg

SEQ ID NO: 75254 - DNA, 110 bp, synthetic construct
  source 1..110: mol_type = other DNA
ctgtgtagtctaagaccaaccactattggcgtctgtgtgtgtatatgtgttttgttttgttttcctttctccttatgggttctaggaggaggagagagaaaggaattggc

SEQ ID NO: 75255 - DNA, 110 bp, synthetic construct
  source 1..110: mol_type = other DNA
tctttcaaagtcttagccagggagctcagggtctcgagcttgtggcagaagtcttaggttctccttgttaagttgccgtgagacagttataccagcatcatccccacagc

SEQ ID NO: 75256 - DNA, 110 bp, synthetic construct
  source 1..110: mol_type = other DNA
aggttctccttgttaagttgccgtgagacagttataccagcatcatccccacagctctgactgttactctgctcacccattttggtggcttctcaacatcccatgaggcc

SEQ ID NO: 75257 - DNA, 110 bp, synthetic construct
  source 1..110: mol_type = other DNA
tccctggctctcgccctcttggaagagcagatccagagcacactcagcctcacttccccagcagctctgcaccaagggtccacgaagatgcttaggttcaagggtcagga

SEQ ID NO: 75258 - DNA, 110 bp, synthetic construct
  source 1..110: mol_type = other DNA
ccccagcagctctgcaccaagggtccacgaagatgcttaggttcaagggtcaggaggagtttttttcatctgtaaaccttaccaccctgtgctctcctattttcctttct

SEQ ID NO: 75259 - DNA, 110 bp, synthetic construct
  source 1..110: mol_type = other DNA
ggagaggacagggcgggaatctggagggaagtatcctccaggagaggttcctgtggagccagcagagtcagctgcctcttcctccctccctcttcccctttcccctaacc

SEQ ID NO: 75260 - DNA, 110 bp, synthetic construct
  source 1..110: mol_type = other DNA
gagccagcagagtcagctgcctcttcctccctccctcttcccctttcccctaacctttccctcagtgacattgctgtgcctgtagtagagcgagaccgttgaacttcttt

SEQ ID NO: 75261 - DNA, 110 bp, synthetic construct
  source 1..110: mol_type = other DNA
ccattcctgccattcactgggttcccacacagctggtccccctccctcccagagtcttagatcaaacagcatcaacaagtactgtctttcccttcagtcacaaaactgcc

SEQ ID NO: 75262 - DNA, 110 bp, synthetic construct
  source 1..110: mol_type = other DNA
cttagatcaaacagcatcaacaagtactgtctttcccttcagtcacaaaactgccccaagtcctcccttgtggccaggttctgaatttgtataaaggagccactggctca

SEQ ID NO: 75263 - DNA, 110 bp, synthetic construct
  source 1..110: mol_type = other DNA
aacatcttttatttagtcatgatttgatcaacttccaatagttaaatacctaggagcaacattcctcaaatttgaaagagaaaagaaaatcaccgtgaaatgctacttac

SEQ ID NO: 75264 - DNA, 110 bp, synthetic construct
  source 1..110: mol_type = other DNA
tctgagaatgctttcaggtactcagcacagtctcatacatactgttttctcaggcagagttttcagtaacccccatgcatggtgagcataatctctttgctgatcttgaa

SEQ ID NO: 75265 - DNA, 110 bp, synthetic construct
  source 1..110: mol_type = other DNA
aaactaatacctttttctctcctttcctcatttccccaaggcctgcctgtcaatagaatctccctcattggtggaaatttttgttagtgccttctttatactggtttgtt

SEQ ID NO: 75266 - DNA, 110 bp, synthetic construct
  source 1..110: mol_type = other DNA
tgagttttaataaaatccccaagtgacttatatttctacacggaagtttgagaagcgtagttatcagagcgttaccatggaatctcagtcagagaacttcccacctgtga

SEQ ID NO: 75267 - DNA, 110 bp, synthetic construct
  source 1..110: mol_type = other DNA
cgtagttatcagagcgttaccatggaatctcagtcagagaacttcccacctgtgagccaccagaatgactaaacagcatcttcatttcaaattagacttgagctgaaata

SEQ ID NO: 75268 - DNA, 110 bp, synthetic construct
  source 1..110: mol_type = other DNA
actaagacacctgcccccagcgggctcctgggtggggcaacccccgagctgggaagaggaacctaggccccattttctgctgccctgaccccctagtatcccctgctgac

SEQ ID NO: 75269 - DNA, 110 bp, synthetic construct
  source 1..110: mol_type = other DNA
gggaagccaaacagcaggatctaaaaggaaaggggtgggagccagacttcggaatctccggtccaagtgctgggaatttgggggaggaaatagcttctggctggagaaca

SEQ ID NO: 75270 - DNA, 110 bp, synthetic construct
  source 1..110: mol_type = other DNA
atcagctccaagtttacaactggagaaccacccctcagccaagtcaggcaatttgccaaagacggcacagcctgtggaggatgtgagtctgcagctctaggccccaaatt

SEQ ID NO: 75271 - DNA, 110 bp, synthetic construct
  source 1..110: mol_type = other DNA
ttcttccttccacccaccagccttggcctctggggcagccacaaggagtctctgcctcgggctcagagagatgctaggacatcgcagtccagctggccttcctcactcaa

SEQ ID NO: 75272 - DNA, 110 bp, synthetic construct
  source 1..110: mol_type = other DNA
ctcgggctcagagagatgctaggacatcgcagtccagctggccttcctcactcaagtcccatcctgtttcatcttccccatcagtcgggtcctcggagagaccttggcac

SEQ ID NO: 75273 - DNA, 110 bp, synthetic construct
  source 1..110: mol_type = other DNA
cacaaatcttcctctggataccactccatttcctctctcctcttcatagcaaacccccctgagctatctacacacttgttctccaattctgtacccccaattctcttctt

SEQ ID NO: 75274 - DNA, 110 bp, synthetic construct
  source 1..110: mol_type = other DNA
aaaaaaaaaaaagactaggagccaatgagaaatggagaccccgagacaaggaggatctccagagtttggttaccaaccagcttccttgtggacctgcgctgcttggggac

SEQ ID NO: 75275 - DNA, 110 bp, synthetic construct
  source 1..110: mol_type = other DNA
tctccagagtttggttaccaaccagcttccttgtggacctgcgctgcttggggacagcgatggccgtacactgccttcctctggcccctgcagctcttttgggaagatag

SEQ ID NO: 75276 - DNA, 110 bp, synthetic construct
  source 1..110: mol_type = other DNA
gaccatttgacaatttccttgaaacttttaaaactcatggttcatagagccaggaactgttgtccgttctctgtcctccttctgttcctgtcattaaccacttctttaca

SEQ ID NO: 75277 - DNA, 110 bp, synthetic construct
  source 1..110: mol_type = other DNA
actgttgtccgttctctgtcctccttctgttcctgtcattaaccacttctttacacatagcttcccagcttctaccccaacatcaaaggatctggttccttaaacaaaca

SEQ ID NO: 75278 - DNA, 110 bp, synthetic construct
  source 1..110: mol_type = other DNA
ggggtcaggggaggaagattgtaggtctaattggtatgttttaatatttggactgcgggccccggtttcatctttcgaaagctgagcggtcaggcgttctcaaggctgta

SEQ ID NO: 75279 - DNA, 110 bp, synthetic construct
  source 1..110: mol_type = other DNA
cgggccccggtttcatctttcgaaagctgagcggtcaggcgttctcaaggctgtatacttgcaaatccatgactgactactgcggagtaaccgaacctcctgaattcagt

SEQ ID NO: 75280 - DNA, 110 bp, synthetic construct; identical to SEQ ID NO: 75278
  source 1..110: mol_type = other DNA

SEQ ID NO: 75281 - DNA, 110 bp, synthetic construct; identical to SEQ ID NO: 75279
  source 1..110: mol_type = other DNA

SEQ ID NO: 75282 - DNA, 110 bp, synthetic construct
  source 1..110: mol_type = other DNA
ctttttttttttttttttctaaagggctgatgatgtaggcaccctctgcctagcacaagccaaaattccagactcctagaaagtacacagcaccaatcacactgtttgga

SEQ ID NO: 75283 - DNA, 110 bp, synthetic construct
  source 1..110: mol_type = other DNA
tactttgacaatgacttgtcgatgagcattagaattgtttccagtttggggctattacaaacaagctgctatgaacatttgtgtatacgctttgaatggatgtatatttt

SEQ ID NO: 75284 - DNA, 110 bp, synthetic construct
  source 1..110: mol_type = other DNA
gatcaggtttttcatctcgctccgtaccgttttactttcccgtctggtgtcctcatcttcctatgctgtcttccccatccctacatgtagctgttccccaaaggtgcttt

SEQ ID NO: 75285 - DNA, 110 bp, synthetic construct; identical to SEQ ID NO: 75284
  source 1..110: mol_type = other DNA

SEQ ID NO: 75286 - DNA, 110 bp, synthetic construct
  source 1..110: mol_type = other DNA
gagttgatttgctgaatgatgctgatttttaaaaaattttgttaaaatgccatttgtacactgagcatgtaaataagtaagagaaatgtggttttgtttttggagcaagt

SEQ ID NO: 75287 - DNA, 110 bp, synthetic construct
  source 1..110: mol_type = other DNA
tctcagaggccaagacgcaggaatccttcaaggcttcttggaggtgctgaagatccatggggagaagacagaagggcatctcgcaggatttgtcaattctaccaattcct

SEQ ID NO: 75288 - DNA, 110 bp, synthetic construct
  source 1..110: mol_type = other DNA
catggggagaagacagaagggcatctcgcaggatttgtcaattctaccaattcctcactcctagagttcctcaaaatgctgtgctgtttgtaagcataatttgtaatcta

SEQ ID NO: 75289 - DNA, 110 bp, synthetic construct
  source 1..110: mol_type = other DNA
tcctcctacccaccacctgaaaactcaccacagacctgtcccgttaccttctcattgctgcaaatctcttcctagctcttcacctcttctgacttcccttcaaatcctat

SEQ ID NO: 75290 - DNA, 110 bp, synthetic construct
  source 1..110: mol_type = other DNA
tgctgcaaatctcttcctagctcttcacctcttctgacttcccttcaaatcctatttccaaaattattttctaaaaaaacaagtctaataccatcacctccacacggtaa

SEQ ID NO: 75291 - DNA, 110 bp, synthetic construct
  source 1..110: mol_type = other DNA
cttctctactgctgagagccgaggtgtcctgctccgagcttggagagataaggaccatccatgtgcctgcttctccttaagcatggggaatgctttatggcctgggacac

SEQ ID NO: 75292 - DNA, 110 bp, synthetic construct
  source 1..110: mol_type = other DNA
tttaagtaggtggtatggtagaacaaacatttgcctgagaggccaaaccccctgggattagaacatacatctgcagtgtagttcacagaccataaacaggtcctcagttt

SEQ ID NO: 75293 - DNA, 110 bp, synthetic construct
  source 1..110: mol_type = other DNA
tgcttgcaatcaaatgtccacaactacagccttaaagtatcaggcttatctattacttggctacacatttataacatattaccctcataaagctcaaggaaataaaatac

SEQ ID NO: 75294 - DNA, 110 bp, synthetic construct
  source 1..110: mol_type = other DNA
cttggctacacatttataacatattaccctcataaagctcaaggaaataaaatacatctcagctttgaaactgtggaaacctcagcactggcattaagacctggagtctg

SEQ ID NO: 75295 - DNA, 110 bp, synthetic construct
  source 1..110: mol_type = other DNA
ggtgggggctgtagggcatgtggctttcttctgattggttggtggtgagattacagggtgatattccagaaatcttgtgctctgcctgaagttaccatcatccacctgtg

SEQ ID NO: 75296 - DNA, 110 bp, synthetic construct
  source 1..110: mol_type = other DNA
gggtgatattccagaaatcttgtgctctgcctgaagttaccatcatccacctgtggggattttagttcctgcagaataactcaaagatataatgtgatttatatcccttg

SEQ ID NO: 75297 - DNA, 110 bp, synthetic construct
  source 1..110: mol_type = other DNA
gagtggtacaaccgttagagtggatgagccaacactaacatatcattattacccaaaggtcacagtttacattaggtttcactcttggggctacacattctatgagtttg

SEQ ID NO: 75298 - DNA, 110 bp, synthetic construct
  source 1..110: mol_type = other DNA
aagaggcagcaatgcctttttaagaagctctgtgttatcctgattacttttaagctttcagcatgttgaatgagcactcacacaactcaaattcctgaggtgcaggacta

SEQ ID NO: 75299 - DNA, 110 bp, synthetic construct
  source 1..110: mol_type = other DNA
tttcagcatgttgaatgagcactcacacaactcaaattcctgaggtgcaggactacaagatccacggccatttacactaatatgtggtgtatcagtcaggatgcaagaag

SEQ ID NO: 75300 - DNA, 110 bp, synthetic construct; identical to SEQ ID NO: 75298
  source 1..110: mol_type = other DNA

SEQ ID NO: 75301 - DNA, 110 bp, synthetic construct; identical to SEQ ID NO: 75299
  source 1..110: mol_type = other DNA

SEQ ID NO: 75302 - DNA, 110 bp, synthetic construct
  source 1..110: mol_type = other DNA
gtaccagtttggaaggatcatcaaagtggtttgcttttacctgggagggtcagcagtgtagttccagaatgttgtttcagagctaagccaattcttctccttgtcataat

SEQ ID NO: 75303 - DNA, 110 bp, synthetic construct
  source 1..110: mol_type = other DNA
catcaggtactacattcttctattcttctacattacatttacattaaatgtacacacagtgaacacttttacaatggcccacaaagcagacctacagtgcaggcttggat

SEQ ID NO: 75304 - DNA, 110 bp, synthetic construct
  source 1..110: mol_type = other DNA
cacttgcagccctctcttgcctcttttggaatcaccactgctagcacaagcccatgcaaagccagggagtggtgcttttcctggatcaacaggttgcggctcccacaagg

SEQ ID NO: 75305 - DNA, 110 bp, synthetic construct
  source 1..110: mol_type = other DNA
gcaaagccagggagtggtgcttttcctggatcaacaggttgcggctcccacaagggaacaagtgctggtcttctggcatgagcagagacactgggcagagatgcactgct

SEQ ID NO: 75306 - DNA, 110 bp, synthetic construct
  source 1..110: mol_type = other DNA
atgcatcccttaagatcatttggccctgaggggaccaaaaattttcacatccaataaggaagggaaaaggaaatcaaattgactattcaccctattacccacatagtaat

SEQ ID NO: 75307 - DNA, 110 bp, synthetic construct
  source 1..110: mol_type = other DNA
gcatttgacctaatgaagacagcaaggcattttctgaaaaaagtgaaagattagctgagagatgagtgataaaattggagtcgcttaggttaagagaggatgaaaaacag

SEQ ID NO: 75308 - DNA, 110 bp, synthetic construct
  source 1..110: mol_type = other DNA
tgagagatgagtgataaaattggagtcgcttaggttaagagaggatgaaaaacagtcctgggcaaaagaatggttatagatgtaagtattatgttgtagaaggatggatg

SEQ ID NO: 75309 - DNA, 110 bp, synthetic construct
  source 1..110: mol_type = other DNA
cattttctatccttctctctctgtgtccctgtctctaatatatacatattactgcatatatatacatacataatatactatggtgttctcaactttatactgacccttta

SEQ ID NO: 75310 - DNA, 110 bp, synthetic construct; identical to SEQ ID NO: 75309
  source 1..110: mol_type = other DNA

SEQ ID NO: 75311 - DNA, 110 bp, synthetic construct
  source 1..110: mol_type = other DNA
agctctcgattcctccacttgcagttttacatttaccatcgttaaaatcccaagcagagtatgggactgctggaaactccctatttccagggttgcaataacttccacaa

SEQ ID NO: 75312 - DNA, 110 bp, synthetic construct
  source 1..110: mol_type = other DNA
agagtatgggactgctggaaactccctatttccagggttgcaataacttccacaagtggtgcccgttcctgcagctgcaccacttccacacatatgattaatgacagcat

SEQ ID NO: 75313 - DNA, 110 bp, synthetic construct
  source 1..110: mol_type = other DNA
ggcaccaaagatatagtctcttcagtgtttggcaaacataaatattacacattaatccttatcccacttgtaatatgtcactgtaatcaattccaaatgaaaagagagct

SEQ ID NO: 75314 - DNA, 110 bp, synthetic construct; identical to SEQ ID NO: 75313
  source 1..110: mol_type = other DNA

SEQ ID NO: 75315 - DNA, 110 bp, synthetic construct
  source 1..110: mol_type = other DNA
gtagtatgtgttgattgttggttctaggaatgggaggggacttaaaaattgtaacaaaaaatgagagtgatctaatgatacaattttgtgtaactcagattacaatacct

SEQ ID NO: 75316 - DNA, 110 bp, synthetic construct
  source 1..110: mol_type = other DNA
ctgaaaccctccagagagtttggggtttggggggcaagagtcatctgttttccttctatggccctgcaataaaccttatctgctccaaactccaacgttttagtattttt

SEQ ID NO: 75317 - DNA, 110 bp, synthetic construct
  source 1..110: mol_type = other DNA
tttgttttttcactttcttctttctcatcttcactcaaaggcttaagagagagagtggatggactggaagtttggggtgaatagatgcaaactattccttttggagtgga

SEQ ID NO: 75318 - DNA, 110 bp, synthetic construct; identical to SEQ ID NO: 75317
  source 1..110: mol_type = other DNA

SEQ ID NO: 75319 - DNA, 110 bp, synthetic construct
  source 1..110: mol_type = other DNA
ataagatattctgatatgtgcattcaacagcccctctcaaaattactactctactttcatcctttcaaaaggctatgaaaaatagcaattttaaattgggataccaccac

SEQ ID NO: 75320 - DNA, 110 bp, synthetic construct
  source 1..110: mol_type = other DNA
ttcatcctttcaaaaggctatgaaaaatagcaattttaaattgggataccaccactacagtgcttctcttcccagcaattttagttttacgatgcctaataatgtcaggg

SEQ ID NO: 75321 - DNA, 110 bp, synthetic construct
  source 1..110: mol_type = other DNA
ctaggtattattgataaactgcttgaaaatcagtgatataaatccattttgcaaaaaagaaaattgaggtcccaagatgtgaagtaacatcttctaacactacagtcagg

SEQ ID NO: 75322 - DNA, 110 bp, synthetic construct
  source 1..110: mol_type = other DNA
attttgcaaaaaagaaaattgaggtcccaagatgtgaagtaacatcttctaacactacagtcaggaaaagataaacctgagacacaaatttaggtatttttatttcttct

SEQ ID NO: 75323 - DNA, 110 bp, synthetic construct
  source 1..110: mol_type = other DNA
agttagatgaaaattatgtaacagaaaggataatcacgatgtggatagaagctgtgataatacctgtttattataatgttggatcatccaaaacaccctgaaagtaattt

SEQ ID NO: 75324 - DNA, 110 bp, synthetic construct
  source 1..110: mol_type = other DNA
tttaaaatatggcaggagtcactataatcatgagaagattattaggctagaatcataggattctacatcctagactcagcttaccacttagtgttatcttttttcattag

SEQ ID NO: 75325 - DNA, 110 bp, synthetic construct
  source 1..110: mol_type = other DNA
gcctacaagtcaaatgaagccaaaggttaaatctttcaaattttttggcctggagtcttaactagattccatgtctcctgcatttaaaattgataataaatgcgtaccta

SEQ ID NO: 75326 - DNA, 110 bp, synthetic construct
  source 1..110: mol_type = other DNA
aatcctcccccaacatttccaacccccacacctgccctacatggtgttttatacggtaccatgtaatttactcatttgttatgtttttggtgttgggggttttgtttatt

SEQ ID NO: 75327 - DNA, 110 bp, synthetic construct
  source 1..110: mol_type = other DNA
tgtaagaatgcttgcaacttcgctgagaaaagattggccccagtctcataccatcatgccccagacacccccaacttactgatggagtttaactggccagagaacaaaac

SEQ ID NO: 75328 - DNA, 110 bp, synthetic construct
  source 1..110: mol_type = other DNA
atgccccagacacccccaacttactgatggagtttaactggccagagaacaaaactattaggaagtcaaacatgcaatgcatcataattcaaggaaaaattgtttgtctt

SEQ ID NO: 75329 - DNA, 110 bp, synthetic construct
  source 1..110: mol_type = other DNA
agctctggcagcgagggggctccttcttcacagtaaggaaggcagcctctccagaaggtggaaaggaggtgaggggctctctaggaaagttacagcaaacgcgccccagc

SEQ ID NO: 75330 - DNA, 110 bp, synthetic construct
  source 1..110: mol_type = other DNA
aggtggaaaggaggtgaggggctctctaggaaagttacagcaaacgcgccccagccctctgtgctctcctccgagggtcatttcatttgtaatgattcatcttaatcttt

SEQ ID NO: 75331 - DNA, 110 bp, synthetic construct
  source 1..110: mol_type = other DNA
acaagcacatgtaaaagaaaacacaaagtaattactaataggcaaaaaagtcagcactggtaacatcttttaggcctctgaattcacctaatccaatttttaggataaga

SEQ ID NO: 75332 - DNA, 110 bp, synthetic construct
  source 1..110: mol_type = other DNA
aaaagtcagcactggtaacatcttttaggcctctgaattcacctaatccaatttttaggataagatctttatgtatatttaaccttttgagaacttagcatgtgcaaata

SEQ ID NO: 75333 - DNA, 110 bp, synthetic construct
  source 1..110: mol_type = other DNA
ttgtttccactgagccacaaggggaactcccccgagcacttttctgacaccgtagagatacagggaaagatagctgagctggccatcaggatgtctacacacaaagatct

SEQ ID NO: 75334 - DNA, 110 bp, synthetic construct
  source 1..110: mol_type = other DNA
cagcctctttggggagaaaggaccagcaagaggactgaaatttaattttctatgtttttcagggtgactacagctgcatgcgatagaaaaagaaagtttcactctctcac

SEQ ID NO: 75335 - DNA, 110 bp, synthetic construct
  source 1..110: mol_type = other DNA
gggcagagagttgcagccaaaagacccctttcctggagagccttgtatcccacatctcataatcttctgctcacctaccagcatttaacttcttaagatcttctcgtact

SEQ ID NO: 75336 - DNA, 110 bp, synthetic construct
  source 1..110: mol_type = other DNA
ctcaagatagctttggagtttccattttttcagtaggctcagctgatattatcgctggtctaggaaaacattactttttacttcactggtaactaactttaacaacttta

SEQ ID NO: 75337 - DNA, 110 bp, synthetic construct
  source 1..110: mol_type = other DNA
aaagccaaaggaacaagactcgctaagcctgttctgtgcctgggcttaatgtgcttggcctttctcactggactcaacagagtagcagagtatcgaaatcattggtctga

SEQ ID NO: 75338 - DNA, 110 bp, synthetic construct
  source 1..110: mol_type = other DNA
tgtgacagcatacaagggcaggagcagaaaaatgctccgttctactagcaggtatatgtctgcagcttccctgtctattgtgtgagtctctaagctgtcctgtctgctgg

SEQ ID NO: 75339 - DNA, 110 bp, synthetic construct
  source 1..110: mol_type = other DNA
gaacaaatctttactctgcaaatgaaagtgtgtgccttcttctcaatgcccgcaatgcaaacatgaaggagggatgagctgcagcagctaagctggacgatgatgtagaa

SEQ ID NO: 75340 - DNA, 110 bp, synthetic construct
  source 1..110: mol_type = other DNA
gagcatttttaatgaacttgtttatcttcagcacaggaggtcaaaataaagttgacaactacattgtgggttgcagagtggaggaaggtaagagggatttcaggatcaaa

SEQ ID NO: 75341 - DNA, 110 bp, synthetic construct; identical to SEQ ID NO: 75340
  source 1..110: mol_type = other DNA

SEQ ID NO: 75342 - DNA, 110 bp, synthetic construct
  source 1..110: mol_type = other DNA
atcatttctgtgggagagaggcacacacttcactatgcacacaagcacatgtgcgtatggtttgtgtcattgaacacacagagagggcaaccaggctgaatagcttcaaa

SEQ ID NO: 75343 - DNA, 110 bp, synthetic construct
  source 1..110: mol_type = other DNA
tatggtttgtgtcattgaacacacagagagggcaaccaggctgaatagcttcaaattttgtaaaatctaaagacaaaagcacactcttgctttttctagaaaatggtgaa

SEQ ID NO: 75344 - DNA, 110 bp, synthetic construct
  source 1..110: mol_type = other DNA
aacattttgcatagattatattatttaattctcaaacaaccctctgagctagcgttatcaggatcctgatttttgcagataaagaaatggaaacatagaaaggttaagcc

SEQ ID NO: 75345 - DNA, 110 bp, synthetic construct
  source 1..110: mol_type = other DNA
atacatcacctgaaatcaagccatggctaagaaatatatcactttcagctccatgtaccattaagggtgaataaaagtgtcagaaataaaggagagcttatacacatatt

SEQ ID NO: 75346 - DNA, 110 bp, synthetic construct
  source 1..110: mol_type = other DNA
taccattaagggtgaataaaagtgtcagaaataaaggagagcttatacacatattacaggtatgggaatgcttgtacaacttgaaaatatatccatcaagaggtgtgggc

SEQ ID NO: 75347 - DNA, 110 bp, synthetic construct
  source 1..110: mol_type = other DNA
tttctatttctttagagtgtagaacagcttatattttaaaggaagaataaagatacagggatctgttcccatcctagatactcatggtgggtccatcttggctttagagg

SEQ ID NO: 75348 - DNA, 110 bp, synthetic construct
  source 1..110: mol_type = other DNA
catggcctagtgatttttgctttgtaatcctgacatggaaaactcagtaataattatgtgcagaaaaattcaccttaacatcgttatgactatatttactaagtatttca

SEQ ID NO: 75349 - DNA, 110 bp, synthetic construct
  source 1..110: mol_type = other DNA
actcatatgtggattcagctttgcgtggatctagatcgtgaaacataaagctaagtcactccaggacacagtgagcagccagcaattgaaacgtctgttgacataagaat

SEQ ID NO: 75350 - DNA, 110 bp, synthetic construct
  source 1..110: mol_type = other DNA
tcactccaggacacagtgagcagccagcaattgaaacgtctgttgacataagaatcaatactcttcagaagaaggtgacagaagaaagtctctgcaatatattggccaca

SEQ ID NO: 75351 - DNA, 110 bp, synthetic construct
  source 1..110: mol_type = other DNA
gtaggcttgtttcttcactacatttgcacagatgagtcacacatcaaatctcacagaaaagagctaacaatacgggcccacagacaaggggaggctgaactgcgtagttc

SEQ ID NO: 75352 - DNA, 110 bp, synthetic construct
  source 1..110: mol_type = other DNA
aaaacttgtgtttattatctttaaatattgtcacggaaggatgtgatacttggagccattgtagtcatatagtgaccaagagcaaaatcccaggaatcagagagaaaact

SEQ ID NO: 75353 - DNA, 110 bp, synthetic construct
  source 1..110: mol_type = other DNA
ccattgtagtcatatagtgaccaagagcaaaatcccaggaatcagagagaaaactgacatcattgaattgctaaattaagtctggaactgcctactgccagattttgtta

SEQ ID NO: 75354 - DNA, 110 bp, synthetic construct
  source 1..110: mol_type = other DNA
aaaatatccagtattgtctgctactatttggtgctcctaactcaatttagagttgccatttctcacctctcttagctaaggcgtggtgtaattctgaagcaaaaggagtc

SEQ ID NO: 75355 - DNA, 110 bp, synthetic construct
  source 1..110: mol_type = other DNA
ccatttctcacctctcttagctaaggcgtggtgtaattctgaagcaaaaggagtcctgtggccagccttttctctcatcccacctgtgatgctctaacccctcctccctg

SEQ ID NO: 75356 - DNA, 110 bp, synthetic construct
  source 1..110: mol_type = other DNA
tatgccacagtgtgtaactccataacacatcacttcttaatttcatttgcttctgttttatattggggaagggcttagcttgttaaaatggaagcctgggttccagtagt

SEQ ID NO: 75357 - DNA, 110 bp, synthetic construct
  source 1..110: mol_type = other DNA
aacccaatccactccctgagcttctggatcaggatcatagaattttagagctattcctcaagcacctactaagttctgtgtcaacaaaaacacatagtccccgacttgac

SEQ ID NO: 75358 - DNA, 110 bp, synthetic construct
  source 1..110: mol_type = other DNA
gtggtgagagagggcatctttttcttgttcctgatcgtagaggaaatgctttcatcttttcacctttgagtatgatgtcagtcgtgagtttgtcatatgtggcctttatt

SEQ ID NO: 75359 - DNA, 110 bp, synthetic construct; identical to SEQ ID NO: 75358
  source 1..110: mol_type = other DNA

SEQ ID NO: 75360 - DNA, 110 bp, synthetic construct
  source 1..110: mol_type = other DNA
ctctgccccagcacattgctactcccctctgtggttttcccttgcagatgccattctttctacctgaaataccaatcccttctggccctaacatcctttgaaatgaagct

SEQ ID NO: 75361 - DNA, 110 bp, synthetic construct
  source 1..110: mol_type = other DNA
ctttctacctgaaataccaatcccttctggccctaacatcctttgaaatgaagctttgatgatctcctaccccaaactgtcttttctgaccacttcgccccacctcctgc

SEQ ID NO: 75362 - DNA, 110 bp, synthetic construct; identical to SEQ ID NO: 75360
  source 1..110: mol_type = other DNA

SEQ ID NO: 75363 - DNA, 110 bp, synthetic construct; identical to SEQ ID NO: 75361
  source 1..110: mol_type = other DNA

SEQ ID NO: 75364 - DNA, 110 bp, synthetic construct
  source 1..110: mol_type = other DNA
accgtggagaggcagaggggaggctgaaaccatgttttaatgtctattctgcgataatctaaatgttttacatatgctgtctgctttaatgttttcacaaaacgtacaga

SEQ ID NO: 75365 - DNA, 110 bp, synthetic construct
  source 1..110: mol_type = other DNA
aggggaggctgaaaccatgttttaatgtctattctgcgataatctaaatgttttacatatgctgtctgctttaatgttttcacaaaacgtacagaggtacatctttattt

SEQ ID NO: 75366 - DNA, 110 bp, synthetic construct
  source 1..110: mol_type = other DNA
gaaggggagggagaagaaatcagaccagcccatggacagttcattttctcatcagggcagtctgttttcaagtgggggagagtgtattggtcaaagggagtggacaaacc

SEQ ID NO: 75367 - DNA, 110 bp, synthetic construct
  source 1..110: mol_type = other DNA
tcagggacccagctggtccccaaggcccagacgtgcctcctgcagaaagccccccgcttccagccccctcctcctcctgccatgtgtcacctgctctgtgctgaaggact

SEQ ID NO: 75368 - DNA, 110 bp, synthetic construct
  source 1..110: mol_type = other DNA
gcttccagccccctcctcctcctgccatgtgtcacctgctctgtgctgaaggactcttcagtccgtagttgtgtgggttcctcttatagtcaggaaacctttggatgata

SEQ ID NO: 75369 - DNA, 110 bp, synthetic construct
  source 1..110: mol_type = other DNA
gtttcaatttgtcagacaatgaacttcagcagaaacctagaatggttttgtccgtgtttttaaacacaagagatttttagtcctagggatttaaattctcagtctaattc

SEQ ID NO: 75370 - DNA, 110 bp, synthetic construct
  source 1..110: mol_type = other DNA
agcactagcggtccagttcagacacctcaacacacacagccttcgggacttcatgatctgccccgaagctgtgtgtgtgtccaggaaatgcttctggacttgacttgagc

SEQ ID NO: 75371 - DNA, 110 bp, synthetic construct
  source 1..110: mol_type = other DNA
aggaccgcagcaggtctttatccagcagtacccctcggtgtcagctcggtggggcctcaccgcggtgtaatgtgtaggatacataagcggtgcggttttcgcaggagagg

SEQ ID NO: 75372 - DNA, 110 bp, synthetic construct
  source 1..110: mol_type = other DNA
ctcaccgcggtgtaatgtgtaggatacataagcggtgcggttttcgcaggagaggatctgcccaaggcggtggtttaattgccattctttcagtacgtgtcatgggcaca

SEQ ID NO: 75373 - DNA, 110 bp, synthetic construct
  source 1..110: mol_type = other DNA
ctttcaacactttggggtatataactggaaatggaattgctggatcctatggtattcctatgtttaattctttgaggaattattgtaactattttccacagcagctggac

SEQ ID NO: 75374 - DNA, 110 bp, synthetic construct
  source 1..110: mol_type = other DNA
tcctatgtttaattctttgaggaattattgtaactattttccacagcagctggaccattttacatgccaccaacagtgattaagtgtgccaattctttcacatcctctcc

SEQ ID NO: 75375 - DNA, 110 bp, synthetic construct
  source 1..110: mol_type = other DNA
gagcccttttgtgttggtctttgtcttcaacacagagtatgtgtgcatattggttgtgctgtctatccactccatgcggaagccgtgccatgtgggctattgcgtcccct

SEQ ID NO: 75376 - DNA, 110 bp, synthetic construct
  source 1..110: mol_type = other DNA
catgtgcagacctacctctcacaatgtaagtttaagactgaacaatcaaaaggactccagaatagagctatacattttccacggtttcagagcactgatcttcaattctg

SEQ ID NO: 75377 - DNA, 110 bp, synthetic construct
  source 1..110: mol_type = other DNA
tccagaatagagctatacattttccacggtttcagagcactgatcttcaattctgcgtatgttccatgaactgaatgccagtcctgctcctgtaacatttaagaaaactc

SEQ ID NO: 75378 - DNA, 110 bp, synthetic construct
  source 1..110: mol_type = other DNA
acgctaacacttgctgcttcactttgcgtgtttctgttaccgagacggcttctttccttagacctcgtgcagcagcctctgcaagcttcacacttttcttctgcagctcc

SEQ ID NO: 75379 - DNA, 110 bp, synthetic construct
  source 1..110: mol_type = other DNA
ccttagacctcgtgcagcagcctctgcaagcttcacacttttcttctgcagctcccttgcctctctgagccttcgtggaattgtagagagttaggcctttcgctgcgtaa

SEQ ID NO: 75380 - DNA, 110 bp, synthetic construct
  source 1..110: mol_type = other DNA
gacgttacaggggacagaggaaggggtgttggttataggcgtggagaaagagcaggaaaggctttgggaaaaaggaaacaagcttggatgaagacatggagttgaaacct

SEQ ID NO: 75381 - DNA, 110 bp, synthetic construct
  source 1..110: mol_type = other DNA
caggcaaaggatcattaacttctcctcgctgagggcaaccaatagatcattttctggacatcagccagtcttattttcattctgaaattgtttaccagcaatgcactctc

SEQ ID NO: 75382 - DNA, 110 bp, synthetic construct
  source 1..110: mol_type = other DNA
ggacatcagccagtcttattttcattctgaaattgtttaccagcaatgcactctcttcttcttttgaaagaaaaaagaagaagctgtgagagagattatgacccagattt

SEQ ID NO: 75383 - DNA, 110 bp, synthetic construct
  source 1..110: mol_type = other DNA
ctatgggagtgctctgtgagcccgggcactcctcctcctcctcctctttaatatagaagagctttcgtttctgagcgggatgcagtggattgtggcaggccagtgctccg

SEQ ID NO: 75384 - DNA, 110 bp, synthetic construct
  source 1..110: mol_type = other DNA
acaaaaagccaagactctttcccctgaaaatctgctgaacagtctacacagcttctcttgagcaggtctgcgggggacaaggttgttcccgttgattgacagggatttta

SEQ ID NO: 75385 - DNA, 110 bp, synthetic construct
  source 1..110: mol_type = other DNA
tcttgagcaggtctgcgggggacaaggttgttcccgttgattgacagggattttagcatgaatgtttaatggacagggcagccagtacacttggctaatgtcgtattcca

SEQ ID NO: 75386 - DNA, 110 bp, synthetic construct; identical to SEQ ID NO: 75384
  source 1..110: mol_type = other DNA

SEQ ID NO: 75387 - DNA, 110 bp, synthetic construct; identical to SEQ ID NO: 75385
  source 1..110: mol_type = other DNA

SEQ ID NO: 75388 - DNA, 110 bp, synthetic construct
  source 1..110: mol_type = other DNA
tcttaaaaatagatttagtatgagctattattttcaccacccataaaaataataatcataaaaatataaaccaggttcaggagttcccatcatggctcagggaaaccgaa

SEQ ID NO: 75389 - DNA, 110 bp, synthetic construct
  source 1..110: mol_type = other DNA
ggaagcccctcttctaagcatcctaagctctggatgtatattagctgatttattcctctggacagccctgtggtggaggctctgtattacccacattttatagttgaaga

SEQ ID NO: 75390 - DNA, 110 bp, synthetic construct
  source 1..110: mol_type = other DNA
ttcccttcgttacggtttatcacgggatactgaatgtagtccctgcgctgcgcaggaggaccttatggtttacccagtctctacgcaccagtctctgcgtatgctcatcc

SEQ ID NO: 75391 - DNA, 110 bp, synthetic construct
  source 1..110: mol_type = other DNA
gaggaccttatggtttacccagtctctacgcaccagtctctgcgtatgctcatcccagctcccagttcattgctcccctccccctggcacccacaagtctgtcccccatg

SEQ ID NO: 75392 - DNA, 110 bp, synthetic construct
  source 1..110: mol_type = other DNA
tgtcacatcgaaggcacctactacatatgtattgggttgaactgacttggatccacagggagaatgaagctggtgctgtgaccagggattcacggccggcttggccatcc

SEQ ID NO: 75393 - DNA, 110 bp, synthetic construct
  source 1..110: mol_type = other DNA
cagggagaatgaagctggtgctgtgaccagggattcacggccggcttggccatcctctgggtgccccatttggcctcaaggtcattgtctccatacttcctagcccgtta

SEQ ID NO: 75394 - DNA, 110 bp, synthetic construct
  source 1..110: mol_type = other DNA
tggcactctaccctagactctcgctggttctaggaggcagggagcacaggtgacattatccgcactttatgttcaaaggggcaccttttttgtgcccagaatcacaaggg

SEQ ID NO: 75395 - DNA, 110 bp, synthetic construct
  source 1..110: mol_type = other DNA
gcccaatgtattttttccgcaaatagttacacacacgtttaggcttagtcctttgcagagcattgcctgtgaaagcttcgtaattgttctacatgttaaattatgtgcat

SEQ ID NO: 75396 - DNA, 110 bp, synthetic construct
  source 1..110: mol_type = other DNA
gccgacgtgtgagactggtggccctggcttcctccaatcagggctgtcctggcagtggtggcaccggcttccctccttttcaggagaagaaaagcagaggaagggggcgg

SEQ ID NO: 75397 - DNA, 110 bp, synthetic construct
  source 1..110: mol_type = other DNA
agatacacttaggaatttaatacatccttccgttaagcatgtaggtttatgggtgcaatacttttattgtgatgtagctgtttggtttctttgtgaaagttggagaaaag

SEQ ID NO: 75398 - DNA, 110 bp, synthetic construct
  source 1..110: mol_type = other DNA
caccttctagagctacgctaacacttccttctgcgtttatgttcctggattttcggtccgtggtcggccccggctctggttctcacgttttcgcctctcttcccgcctgt

SEQ ID NO: 75399 - DNA, 110 bp, synthetic construct
  source 1..110: mol_type = other DNA
tctaactctctcccctccgtgcaacgcaccggattcaaaaggcagcgcctttaaggagagcctggtctggcagcttggagaatttatgatcaacagacaaaagacagccc

SEQ ID NO: 75400 - DNA, 110 bp, synthetic construct
  source 1..110: mol_type = other DNA
taaaatgcagccttgcgagaacattgaaaatgcgatgcgacacaaaattcagtacacaccccttgcccctatctgtccagtcctagaggcgacatcaatttcctaatgcc

SEQ ID NO: 75401 - DNA, 110 bp, synthetic construct
  source 1..110: mol_type = other DNA
atcagctcaatgcagtcatcgttcagcaatctgtagaaaacataaaattataacattcatgtttccaaattgtatagacaccctgtgtatactagggattcttcaaaaat

SEQ ID NO: 75402 - DNA, 110 bp, synthetic construct
  source 1..110: mol_type = other DNA
aaatttgccacctcggtgggtgatcttgaaatggtaaataaccatttcaaaggctagtcggtcacaaatacttgcagaaagcaaacagcatacatattctagatgccaac

SEQ ID NO: 75403 - DNA, 110 bp, synthetic construct
  source 1..110: mol_type = other DNA
agtcggtcacaaatacttgcagaaagcaaacagcatacatattctagatgccaacagcaaggaggggaagaaagaaaaaggcagcaaaagaaatttttgtgtagaatgag

SEQ ID NO: 75404 - DNA, 110 bp, synthetic construct
  source 1..110: mol_type = other DNA
acttgtgtcagcgattcctccgtctcccaaacgtcctctcgcttccgctcagccccctccacctgcatttccggcctgcctgtcaaatagttaatgatctgcacaccaac

SEQ ID NO: 75405 - DNA, 110 bp, synthetic construct
  source 1..110: mol_type = other DNA
caaccactcgctaaatcggggtgccgaattgcgctaatccgaggcttcagaatactgtggattgcaagaagcctcgctgtcctttgttaaccccaaagacaaggttaaca

SEQ ID NO: 75406 - DNA, 110 bp, synthetic construct
  source 1..110: mol_type = other DNA
acgaggacatttaattactgctgtgctcgtcacctcctgcaagtcattcataatgaccctctgtaaataccggcccatctcacagccagaagccaccggccaccccctcc

SEQ ID NO: 75407 - DNA, 110 bp, synthetic construct
  source 1..110: mol_type = other DNA
tcttcttctccagcccacatttcttggatcctctgaagctgggctaagtgtcctcttcctgtttctagagcgtcacacacagctctcgggactgcactttccatgctatc

SEQ ID NO: 75408 - DNA, 110 bp, synthetic construct
  source 1..110: mol_type = other DNA
ccccagtggccagccctgtcaccacccaggccggctccccctccgcccccgacatgcctcagatcccagggcccacacaccggccactttaattgacaaccaaggcaact

SEQ ID NO: 75409 - DNA, 110 bp, synthetic construct
  source 1..110: mol_type = other DNA
gcctgtcacctgctttggcgataaggttctatgtggggacactgccggctccacctctacgaggggtctgggctaaaacggcagagctgcctgctgtcacagacacactg

SEQ ID NO: 75410 - DNA, 110 bp, synthetic construct
  source 1..110: mol_type = other DNA
cgtcctggcgatgcttctcccttcaactcgacggttcctcaactcagatcaccatctaccaatcggtttggaaagcagttacattttacattctactgttttctatgtaa

SEQ ID NO: 75411 - DNA, 110 bp, synthetic construct
  source 1..110: mol_type = other DNA
caagatgggttgagtaattatagcagttacccaactcaaaccagcttagcagctttcaatggctatcctatcacagcaagattatttttcattcttgaagcacaagagaa

SEQ ID NO: 75412 - DNA, 110 bp, synthetic construct
  source 1..110: mol_type = other DNA
cctccctcttccatgtttaaggttccgtctttacacagggcccagctcgatacacaggataacttctctattttaatttcacctgctaccctaattcccctgtgccatgt

SEQ ID NO: 75413 - DNA, 110 bp, synthetic construct
  source 1..110: mol_type = other DNA
gagcacatccagcaaccgtggtttttataaatgaagttttattggaacacagacccccattcattgattattgtctgcgactgcttttgtgctgccatagctaagttgag

SEQ ID NO: 75414 - DNA, 110 bp, synthetic construct
  source 1..110: mol_type = other DNA
cccattcattgattattgtctgcgactgcttttgtgctgccatagctaagttgagtagttgcagcagaagctgtaaggccacccaaacctatgcgtggccctttacataa

SEQ ID NO: 75415 - DNA, 110 bp, synthetic construct
  source 1..110: mol_type = other DNA
ccaggcccatccccgagcgagttacgccatgacctctgggagtgggatccgaggtctgagtgtttccagagcggagagcaaactactcgtgctgaaagaccagctttggg

SEQ ID NO: 75416 - DNA, 110 bp, synthetic construct
  source 1..110: mol_type = other DNA
agaaataggaaaggcatgtcaatccttgcatttttaatacactttaaattctaatttgccacactaaagctaaggttacattgcggtgctatcaattcactcagttcaca

SEQ ID NO: 75417 - DNA, 110 bp, synthetic construct
  source 1..110: mol_type = other DNA
ttgccacactaaagctaaggttacattgcggtgctatcaattcactcagttcacacgtcaaagacgcagacagccgaggaaacgcccaagcgggcagggggcgtactcgc

SEQ ID NO: 75418 - DNA, 110 bp, synthetic construct
  source 1..110: mol_type = other DNA
acttcctacgcggaaggtccgtctcaggtattcaccgatgccgcgaggtgtgggagtgaggacacaggtttctcacgtggagtggagtcagtgtaaaactctcaagttcc

SEQ ID NO: 75419 - DNA, 110 bp, synthetic construct
  source 1..110: mol_type = other DNA
gtgaggacacaggtttctcacgtggagtggagtcagtgtaaaactctcaagttcccgagcaagacttgagaagcactcaccgctctgttgcttacagatgagaccactga

SEQ ID NO: 75420 - DNA, 110 bp, synthetic construct
  source 1..110: mol_type = other DNA
agattacacacccactgcttatgcgttcccccgcaatgggcacccaaagtaactttcagctttctgtgactataaattaacactgtgataaatatcctcatgtaagttgc

SEQ ID NO: 75421 - DNA, 110 bp, synthetic construct
  source 1..110: mol_type = other DNA
ttaacactctaaatcattccctcaatgataattgctatagctcacgtgccaacgctccattttggcagaagtcgtacagtgttctgccctgtgtaccatcgatttcaaca

SEQ ID NO: 75422 - DNA, 110 bp, synthetic construct
  source 1..110: mol_type = other DNA
aatcgctgggggagtaggaccagcctggtacgccttccttgcagagctgcggggtgggcacatgggaaggaacaaaggacgtctgactctctcttggtgtatctattgcc

SEQ ID NO: 75423 - DNA, 110 bp, synthetic construct
  source 1..110: mol_type = other DNA
agtcctggacacgtagcagtcataaaactgcctggtgtcattactgttggtcaatcttcgcagagaacagtctcagctggaacaagcgggggagaaggggctctggggtg

SEQ ID NO: 75424 - DNA, 110 bp, synthetic construct
  source 1..110: mol_type = other DNA
atcgtccagtctaactattaggctcagtgagcggtagagaaccccagaggaacatgggcagggctgctggccttacgaatgtggccagcctcttttgacaaggggaagcc

SEQ ID NO: 75425 - DNA, 110 bp, synthetic construct
  source 1..110: mol_type = other DNA
cctcttctgcagctttcgatgttaatagcagcatggttggggttattgtgaagcgagctgataggatcaggcagtgctctgttcataaacggcagcgtgtcctcctgtgc

SEQ ID NO: 75426 - DNA, 110 bp, synthetic construct
  source 1..110: mol_type = other DNA
ctatttttgaaagatttgtttttacttctaaagataaccacagttaatgaccttaaaacttcatccatttccatttctatgccggaagtctaatttggtctttactcttc

SEQ ID NO: 75427 - DNA, 110 bp, synthetic construct
  source 1..110: mol_type = other DNA
aagactgacctgaggacaaaacgattttcgtcgtggtctggctgtagggaagggtgtaaaatttacccaagtttcggatcagccccttcctgctggagcccagccctcac

SEQ ID NO: 75428 - DNA, 110 bp, synthetic construct
  source 1..110: mol_type = other DNA
tcccttcactccgaatcgtggtcccttaagtcccgccccagctgtttgctctctggtgacttcacgcagctgtcgtgtgtacttcgtggagcttttaaggttgttttgaa

SEQ ID NO: 75429 - DNA, 110 bp, synthetic construct
  source 1..110: mol_type = other DNA
aaaacactctttatggtatcctaggacagaggcggtggacacatttggaaaaggagccttcttcctaaagctccagttcacatctcgttggagaaatgtgtattcgaagc

SEQ ID NO: 75430 - DNA, 110 bp, synthetic construct
  source 1..110: mol_type = other DNA
cctgtgctcgcactcatttcttgggccaaaagtagcagttggcagaatatctcgcagataccaggtctgtgtgagacgaaacccatcacgcgtgatgcccgcagatgggc

SEQ ID NO: 75431 - DNA, 110 bp, synthetic construct
  source 1..110: mol_type = other DNA
ttgaaggcaggctaggtcttaacgccaccacacgtgggtgaggagaaaggccccgggtgttggaagagtggatcagcatcacgtcgagaaagccatgaaatcaaggactg

SEQ ID NO: 75432 - DNA, 110 bp, synthetic construct
  source 1..110: mol_type = other DNA
tgccacagcagttgtcaaccacactgacctgtagaccaggagatctggagatggtccccgggccccagcagaagtcagggcctcggatgagcatgtgagctcctttcttg

SEQ ID NO: 75433 - DNA, 110 bp, synthetic construct
  source 1..110: mol_type = other DNA
ctgtgtgtgcctcagatgtcagctagagacacaagcagagtgtacacttggaattggaagctccccctctctggctctttcttctatcacgtttgagcagctgtggtcat

SEQ ID NO: 75434 - DNA, 110 bp, synthetic construct
  source 1..110: mol_type = other DNA
agctgcctgagttctgtggccagactttctggtcacaggatgggagtctatgcttagctgttgaacagggctgcagatgtacttcccttcccagatggggtcatataaca

SEQ ID NO: 75435 - DNA, 110 bp, synthetic construct
  source 1..110: mol_type = other DNA
tcgtaggtcccggagcacgggagcctatgtggaagcatcctgccggctgcagcgtgtctttctcagcacccgcccagagctggcaaagctggcgaaggacttgaatagac

SEQ ID NO: 75436 - DNA, 110 bp, synthetic construct
  source 1..110: mol_type = other DNA
aaattctcaacaaaattttagcaaaccgaatccaccaacacataaaaaaggatcatacagagttcccctcatcatggctcagcagtaacaaactcaactaggatccataa

SEQ ID NO: 75437 - DNA, 110 bp, synthetic construct; identical to SEQ ID NO: 75436
  source 1..110: mol_type = other DNA

SEQ ID NO: 75438 - DNA, 110 bp, synthetic construct
  source 1..110: mol_type = other DNA
cttaataactcccatcagcaggtgatactcagtaaccccactgagacaggctgggacctgggacccttttctgcagtgctcgcacctagacaaacatctccagcaacaag

SEQ ID NO: 75439 - DNA, 110 bp, synthetic construct
  source 1..110: mol_type = other DNA
tgtcctcatttatcctgtgatagatagaaatgctttcgtcaccccatgaggcatgaggtgcgtctcttcctcgggatcacaggaagtaacagatcgttaagggcaggagg

SEQ ID NO: 75440 - DNA, 110 bp, synthetic construct
  source 1..110: mol_type = other DNA
cttattatggaatgaaaaaggttcagccattaaggtagactagtagtttgggggtgtgggggtgtggcatggcccccttgtagcagtccagcagggagtgcccaggacgg

SEQ ID NO: 75441 - DNA, 110 bp, synthetic construct
  source 1..110: mol_type = other DNA
aaaaagcacattggcttaaaactggggcagccaccaaaagcgtcagggtgaggcgaggcctggaagactgcggactccgcttctgggttggtcaaggggccagcagagct

SEQ ID NO: 75442 - DNA, 110 bp, synthetic construct
  source 1..110: mol_type = other DNA
ggactcaaacctttgagtcggggcacctgatgggtctgtcctggaatggagctacaagtagcccggcacgctgtgggtgggcgctttgacctggcatctcctggcactcg

SEQ ID NO: 75443 - DNA, 110 bp, synthetic construct
  source 1..110: mol_type = other DNA
gtaacaaacagcaccctgcaacttagggccttaaaataatcatattggtttgctcattatttcatgagtcagggattctgggaaagaccccataggcagctcatctccga

SEQ ID NO: 75444 - DNA, 110 bp, synthetic construct
  source 1..110: mol_type = other DNA
attatttcatgagtcagggattctgggaaagaccccataggcagctcatctccgatttgtaagacgtgagcttgtgaggcagctggggctggcgggtccacttccaagtc

SEQ ID NO: 75445 - DNA, 110 bp, synthetic construct
  source 1..110: mol_type = other DNA
taaaccgtttcgggagatcccagaagtttttgtttggaattggccggtgatggcagctctttcagaagactgattggctttgggaggaaaaggcgggtcggggttcattc

SEQ ID NO: 75446 - DNA, 110 bp, synthetic construct
  source 1..110: mol_type = other DNA
gatattttttgccccagtaggtcatactcaggtatataagccttcatccacgcactggagcacagagacttcagagctgttgcagggtttgaggagcacccagggttagt

SEQ ID NO: 75447 - DNA, 110 bp, synthetic construct
  source 1..110: mol_type = other DNA
tgttttaagatgtttaatcttttgaagacaaacacattagcctggagaagccagtcgtattttaaatgagtgcagcctacactgtaggggaaaacatgtcaccttccccg

SEQ ID NO: 75448 - DNA, 110 bp, synthetic construct
  source 1..110: mol_type = other DNA
gtgttggtgtctcttgattgtctttttaaaatgcacgttggggttttctgtgttcttgggatgattgtgattttcagttgaaaccttcaggggtcataggctgtggattt

SEQ ID NO: 75449 - DNA, 110 bp, synthetic construct
  source 1..110: mol_type = other DNA
aataaacactgaaggagttttatcacactcactacctgccccctctcatgccaacatcactaatatcatcagcaatcaatgtacttattatcactaatatcatcagcaat

SEQ ID NO: 75450 - DNA, 110 bp, synthetic construct
  source 1..110: mol_type = other DNA
catcaccgggaaggcagaaatcccgccgcagctggggccagaggaaggtttatgtgactcacttctccttagtgtccttggtcactgaggtgaccttacctagtgttcag

SEQ ID NO: 75451 - DNA, 110 bp, synthetic construct
  source 1..110: mol_type = other DNA
accaggtgtcagatgagcgcagccagaatcccagctggtagactcccaagtccgagccatcccgacagctccccggggcctcctgggagggggcatggactggtttgggg

SEQ ID NO: 75452 - DNA, 110 bp, synthetic construct
  source 1..110: mol_type = other DNA
gacagacagcaaacaggtgaaatacatgcgtgagaaggatcatcacagctttgggctcctatgatcagagactctagttgctgagatctgaaggatgagcaagaaccagc

SEQ ID NO: 75453 - DNA, 110 bp, synthetic construct
  source 1..110: mol_type = other DNA
ctcctatgatcagagactctagttgctgagatctgaaggatgagcaagaaccagccatgcgtcctctgcagagactgcccctgagcaggaaatgccttgcagatctgaga

SEQ ID NO: 75454 - DNA, 110 bp, synthetic construct
  source 1..110: mol_type = other DNA
gtacctgccggtgccagagtgagtgccatgtctgtggcagcttcacgcgatttagaggtcacccactgtaatgcattccctccttttcctcttcggttttaaagacagtg

SEQ ID NO: 75455 - DNA, 110 bp, synthetic construct
  source 1..110: mol_type = other DNA
taaaatctaagtaaaaaaattatacaatctgaaaataaaatcactgtaaatctggaaaactagaaccacgtaaatgttggtattgggctcagttatcatctgcagtagga

SEQ ID NO: 75456 - DNA, 110 bp, synthetic construct
  source 1..110: mol_type = other DNA
tctgtgtaaatgatgcgtcacctcctggcaatttaacttatgagccttggcatcaccctctgtctccctgccatccaatcggatgcaatcggcctttcttctccattttc

SEQ ID NO: 75457 - DNA, 110 bp, synthetic construct
  source 1..110: mol_type = other DNA
ccctctgtctccctgccatccaatcggatgcaatcggcctttcttctccattttcactttaaggttcagcacagggtgtcctagtcttttaccctgaactgttacaactg

SEQ ID NO: 75458 - DNA, 110 bp, synthetic construct
  source 1..110: mol_type = other DNA
gctggcaggaaaagcgaatgaaagtcaattctctccataagctgctcttacttgaaagagatttggggtcatcttctcttctctactgtggggtgtttgacccctgcata

SEQ ID NO: 75459 - DNA, 110 bp, synthetic construct
  source 1..110: mol_type = other DNA
aagagatttggggtcatcttctcttctctactgtggggtgtttgacccctgcatagtgtttagaaaatcttgtctaaatttcctttttcttcttctttagctgccaaact

SEQ ID NO: 75460 - DNA, 110 bp, synthetic construct
  source 1..110: mol_type = other DNA
ccccaaccacacacaggactgaccagctccccttctgtaaacccagcctagccctctgcctcacgctccacggtgtcctggcagttccaggagctgcctcttcctcatct

SEQ ID NO: 75461 - DNA, 110 bp, synthetic construct
  source 1..110: mol_type = other DNA
atttcagccatgactgttgactgtgtttcattacaaatgatgctatttaaaagcactgtctttagctaaaaaggtacgattttattatttaaccaacattttatgtgtca

SEQ ID NO: 75462 - DNA, 110 bp, synthetic construct
  source 1..110: mol_type = other DNA
gcggagaaggagcagtggcggcagcaacagcggacagaggccctgcgccgggccgctgtgggccaaggcgacttcagtcttctggatcaccgaggccaagttcgctgcaa

SEQ ID NO: 75463 - DNA, 110 bp, synthetic construct
  source 1..110: mol_type = other DNA
taaagaatgccaactcaacaacaataaaaaaaaaaaccacccaatccaaaaatggtcaaagtgagttcctgccctggcacggcagaaatgaattggacaagtatccattt

SEQ ID NO: 75464 - DNA, 110 bp, synthetic construct
  source 1..110: mol_type = other DNA
tttctctggagtgggatcaatcctcccacccttttaaaactgtgataaaataacattccttaaaacttacaatcccaaccaccttattttttatttttatttcattatgg

SEQ ID NO: 75465 - DNA, 110 bp, synthetic construct
  source 1..110: mol_type = other DNA
tgcacctttcttttccccacccagcatatgctgtggccgtcttgaccccagcacggccgcacggaaacttcacgcgacatctgtactgtgaagtctttcgctggttttac

SEQ ID NO: 75466 - DNA, 110 bp, synthetic construct
  source 1..110: mol_type = other DNA
acccccaccagcaatctgtggaaacccccgtttcctcttatcagaatttcccatttttgcccagtgtgacatgacatcccattttaaaataacttcatggtctttgcaag

SEQ ID NO: 75467 - DNA, 110 bp, synthetic construct
  source 1..110: mol_type = other DNA
aggcggggagagcaaataggaagggtgggacggatgccactgagaggaagtggtcctggcgacacgtgagcctggttctaacgggggtgggggggcaggtgaagggtgtg

SEQ ID NO: 75468 - DNA, 110 bp, synthetic construct
  source 1..110: mol_type = other DNA
ctggcgacacgtgagcctggttctaacgggggtgggggggcaggtgaagggtgtggcaggcaggtggaaccatggggtgtcctgactttggtaccttggctacgagtgaa

SEQ ID NO: 75469 - DNA, 110 bp, synthetic construct
  source 1..110: mol_type = other DNA
taaccactgcaccacgacgggaactcccaggaaaagtgatttttcactgaaagccttcaaagctgccgagggctccctgtctacccacttcctggtgggaggggctggca

SEQ ID NO: 75470 - DNA, 110 bp, synthetic construct
  source 1..110: mol_type = other DNA
ccgccactcggacagcactagctccttaactgtcaggccacagggaactccacgctttctctttagaccctccacttggatgtgttttcagatgtccgaaggtagggcac

SEQ ID NO: 75471 - DNA, 110 bp, synthetic construct
  source 1..110: mol_type = other DNA
ggaaaatcactggacttggaggaaacgaaatgccattcaggcaaaaacgctgttgcttacaagggaaggaaaatgaaactgtcattcatttgacagcgattttttgtgct

SEQ ID NO: 75472 - DNA, 110 bp, synthetic construct
  source 1..110: mol_type = other DNA
tcctctgaaggtttggagctagtccctctggccttggagttccaggccattcctcccgggtgtcacccctgctggagtcactctcctgtctctcttccttctcgaggctg

SEQ ID NO: 75473 - DNA, 110 bp, synthetic construct
  source 1..110: mol_type = other DNA
gcaggcatgttggggtgctggcgcatcctggccagccttgtccttgcggctcggtcgtgctgtcgcacgtctttgctcagcccgtcttcgcacgccactgtctctggaga

SEQ ID NO: 75474 - DNA, 110 bp, synthetic construct
  source 1..110: mol_type = other DNA
cgtgctgtcgcacgtctttgctcagcccgtcttcgcacgccactgtctctggagaatcctttgaaatgtgtgagtccgtgccgtgcccggcctcagcagcgcctggccgt

SEQ ID NO: 75475 - DNA, 110 bp, synthetic construct
  source 1..110: mol_type = other DNA
tcctgagggtgaggttcctttcttgcttattctctgtgtgttcttctatttgcctctgtctagagctggcccatctttggctcggtggaggttttgtgtggactttgaga

SEQ ID NO: 75476 - DNA, 110 bp, synthetic construct
  source 1..110: mol_type = other DNA
gccacctctcatttgttttgcccgataattggagattaattaactacgacagcgcctaatgggagcctctcacctgcagttcccctccttgcacagaaaacaccaagcag

SEQ ID NO: 75477 - DNA, 110 bp, synthetic construct
  source 1..110: mol_type = other DNA
cgcacggagctgtgacgacaatactggccaggagccctggggggcgtgggttccaacgtcccgagaccctcagggatcagccacacctttgcccttggatgactgtggtg

SEQ ID NO: 75478 - DNA, 110 bp, synthetic construct
  source 1..110: mol_type = other DNA
acgtcccgagaccctcagggatcagccacacctttgcccttggatgactgtggtgttgctttcgtagcctgtgaccatactacaggtgtaccctggaatactactctgcc

SEQ ID NO: 75479 - DNA, 110 bp, synthetic construct
  source 1..110: mol_type = other DNA
cgcgtcctttctgcatctctggtccacacaaggggcaagaacactctccccaggtgggcctgagccaagtgaactggccggttgaacagcaacacccttccagctcctcc

SEQ ID NO: 75480 - DNA, 110 bp, synthetic construct
  source 1..110: mol_type = other DNA
tttttaatttaatttattttcttttcagaggcttcatagggaagtggtatatggatgctcctaggctaaaggttgaatcagagctgcagctggcgtatatactgcagcca

SEQ ID NO: 75481 - DNA, 110 bp, synthetic construct
  source 1..110: mol_type = other DNA
tgctcctaggctaaaggttgaatcagagctgcagctggcgtatatactgcagccacagcactgccagatctgagcctcatcagtgacctaggccacagttgccagatctt

SEQ ID NO: 75482 - DNA, 110 bp, synthetic construct
  source 1..110: mol_type = other DNA
cagtgccacgctgggcgctctgcctgtcccgctgtgaacggtcaccgcgttcacgtgggcgcgtccttacctgtgtgtggcaatcccacgttttgctcttgtttgactct

SEQ ID NO: 75483 - DNA, 110 bp, synthetic construct
  source 1..110: mol_type = other DNA
gcacaacttaacgagcgctaattaagcgtctctctgcagacacccagctaatcgcggggttgagaggatgatgagacgctgctgccacgagcgaccacaatctgtcactg

SEQ ID NO: 75484 - DNA, 110 bp, synthetic construct
  source 1..110: mol_type = other DNA
tcgcgcccgtcgtcggctggtccgtggtgtcttctttcactgcgtgtgtcctgtgctggagattgtctaaataaaacacttattttgttcctgctatttcatcccatcgc

SEQ ID NO: 75485 - DNA, 110 bp, synthetic construct
  source 1..110: mol_type = other DNA
ctggagattgtctaaataaaacacttattttgttcctgctatttcatcccatcgctcagctcttgagatgcgactagaggtttttcactgtgtctttaacgtacctgttg

SEQ ID NO: 75486 - DNA, 110 bp, synthetic construct
  source 1..110: mol_type = other DNA
tctcctggggtggggtcgtcatggtgtgggtcccctaaggctgaggcgtgcgttccttttgggaagcttctagccgtggactccagtggtagcgctggtaatgcctcgct

SEQ ID NO: 75487 - DNA, 110 bp, synthetic construct
  source 1..110: mol_type = other DNA
cttttgggaagcttctagccgtggactccagtggtagcgctggtaatgcctcgctatacgtcctgcgaggaacctgcacgcatattctgttcggtgggaatctaggcgtg

SEQ ID NO: 75488 - DNA, 110 bp, synthetic construct
  source 1..110: mol_type = other DNA
ccccagtgtgttaaaagtgcccaaaatatggagagaaaacgtggtatatgggacccactgctcgtgaccgattcagaacccacgacctagggcggtgacaaacctcagcc

SEQ ID NO: 75489 - DNA, 110 bp, synthetic construct
  source 1..110: mol_type = other DNA
cactgctcgtgaccgattcagaacccacgacctagggcggtgacaaacctcagccttcgctcagcgttgagtgcaaagtttcatttctaaacggagaattgaaaaatgga

SEQ ID NO: 75490 - DNA, 110 bp, synthetic construct
  source 1..110: mol_type = other DNA
gtcagtgagagtctcatataagttgaaatcttcccctgtttgttcttaggttctgttttgggctctactgctatttacctgtgtttcctcgattttctgttgtttacgtt

SEQ ID NO: 75491 - DNA, 110 bp, synthetic construct; identical to SEQ ID NO: 75490
  source 1..110: mol_type = other DNA

SEQ ID NO: 75492 - DNA, 110 bp, synthetic construct
  source 1..110: mol_type = other DNA
tataattgaaaatcataaactatagcattcacctgctgttcccatgcactggcaaaacgatacgaggctatttcatcactcagcctggtaattggcacggcccgcatcag

SEQ ID NO: 75493 - DNA, 110 bp, synthetic construct
  source 1..110: mol_type = other DNA
atggtcaacggccaactggcagattgcgacatccagtgagaagcaaggaatacgtggatcattttacaggcacgagggggacggcgtggtaagatgccccacaccaccgt

SEQ ID NO: 75494 - DNA, 110 bp, synthetic construct
  source 1..110: mol_type = other DNA
ggatcattttacaggcacgagggggacggcgtggtaagatgccccacaccaccgtgccctggaaacactgcccatttgcgtctgcctccctctctagggccctgtctcat

SEQ ID NO: 75495 - DNA, 110 bp, synthetic construct
  source 1..110: mol_type = other DNA
agcacagccaggggccggggccagagtgggggggttgtccaggaaagacgcaggagtccaaggtcagaaccagtccccccaccaactgagccctcatgtcagccggggtc

SEQ ID NO: 75496 - DNA, 110 bp, synthetic construct; identical to SEQ ID NO: 75495
  source 1..110: mol_type = other DNA

SEQ ID NO: 75497 - DNA, 110 bp, synthetic construct
  source 1..110: mol_type = other DNA
agccagacaagttgaaagtggttctgcagagagtgaccacagccagggagccagctgtgagccaagcgacgtccactaagcattgaaggttaggacctcctgagctgacg

SEQ ID NO: 75498 - DNA, 110 bp, synthetic construct
  source 1..110: mol_type = other DNA
tggccagggtggcagcttagacttactgggagcttgagccgcaaaggggtctggacttacccgaaagctcttctctgctgggtgctgccagaaagactggggaggtctct

SEQ ID NO: 75499 - DNA, 110 bp, synthetic construct
  source 1..110: mol_type = other DNA
cttacccgaaagctcttctctgctgggtgctgccagaaagactggggaggtctctctcaaggaccccgacaaataaataccgtatgatattacctctatgtggaagctaa

SEQ ID NO: 75500 - DNA, 110 bp, synthetic construct
  source 1..110: mol_type = other DNA
tcaaaaacacgtttcataaacgggcattaatgtctctcctggcgacgagcagcgtgactctctcggccaacttgcagcaaatcattcgggcccattttcttacatctcaa

SEQ ID NO: 75501 - DNA, 110 bp, synthetic construct
  source 1..110: mol_type = other DNA
cctttcctgctgggggctgggagcatattcccgaatccgctggaacctcaatttcttagcgctgcaaagacaatggtgcgtcacctttcaagctgcccggagggttgatg

SEQ ID NO: 75502 - DNA, 110 bp, synthetic construct
  source 1..110: mol_type = other DNA
ccgtgatataattcacgcgcattgagacaccctgaagtgagtagccctttaagagccagaatcgctattttattgtcgtctgcggctgttataacttacaatttcataac

SEQ ID NO: 75503 - DNA, 110 bp, synthetic construct
  source 1..110: mol_type = other DNA
ccagaatcgctattttattgtcgtctgcggctgttataacttacaatttcataacattccaattactgggtagttagagagcgtgtgtcaggtctctggcacccttgtgg

SEQ ID NO: 75504 - DNA, 110 bp, synthetic construct
  source 1..110: mol_type = other DNA
tacaggcaaccatttaaagaacagaaaccctgacactttgctgaggggactccgtcacttacttacctgggtctgggttccaacggacagaaaagacctactttggcaag

SEQ ID NO: 75505 - DNA, 110 bp, synthetic construct
  source 1..110: mol_type = other DNA
acgaaacgtcagagcgtccccgtcaccagaccaaacctcaacccagctgacggagcctcataacaaagcctgaggagccaggcgctggtcagagggcaccgctctgccca

SEQ ID NO: 75506 - DNA, 110 bp, synthetic construct
  source 1..110: mol_type = other DNA
cgtctttttgggctggagagagaacaaatttctctaggctactgggtgaagagcgaacaagagaccacagctgcagcggcgctgagtgttgggggagcacagccgggccc

SEQ ID NO: 75507 - DNA, 110 bp, synthetic construct
  source 1..110: mol_type = other DNA
ccccccagatgctcaggggaccaggaccctgtggccccaggctcccggccccctactctgccactgcttccatctctcataagcacgtaccgcacagcacacggtcccct

SEQ ID NO: 75508 - DNA, 110 bp, synthetic construct
  source 1..110: mol_type = other DNA
cgccaggcgccactctagagctttacttaagagaattcacttaatcctcagcgcgagctctgcggcacatggccgtacgtggtgtggccaggatccaggcccggctgacg

SEQ ID NO: 75509 - DNA, 110 bp, synthetic construct
  source 1..110: mol_type = other DNA
gcactgagatgtgtctgtcttcccatggcaccggagggggctgtcccggtgaccaccttggcttacggttactaaacacgagccagcataattacgacgaaggaggcgct

SEQ ID NO: 75510 - DNA, 110 bp, synthetic construct
  source 1..110: mol_type = other DNA
agaggcaagggagaagccaggctatataggcgtttctgcgacaaaaacaagagcgtctaaacatcaaaagatgacggttatttagacaccgtggggggagggagagacga

SEQ ID NO: 75511 - DNA, 110 bp, synthetic construct
  source 1..110: mol_type = other DNA
tggggggtgtgcctctgcatggccttggccccagcgcagctgctggctccaaggatggcaggggccgccttgctgaccctccacctgcctgacggcttcttcccacgtgc

SEQ ID NO: 75512 - DNA, 110 bp, synthetic construct
  source 1..110: mol_type = other DNA
tggcaggggccgccttgctgaccctccacctgcctgacggcttcttcccacgtgcagaggcagtaacgaaacttcaatttgaccatcaggaatccgtgagatcagcctgt

SEQ ID NO: 75513 - DNA, 110 bp, synthetic construct
  source 1..110: mol_type = other DNA
gggggtggcaccgcctgggggttcacctgtgacaagaagaagtgagcagtcagatgcgggtcagcggacagtctgtctcctcttggtctccacctgcccacgttgccagg

SEQ ID NO: 75514 - DNA, 110 bp, synthetic construct
  source 1..110: mol_type = other DNA
gcgggtcagcggacagtctgtctcctcttggtctccacctgcccacgttgccaggaagatggcacggaaagcagacagaggagacaggcccacgggaagagctgccggcc

SEQ ID NO: 75515 - DNA, 110 bp, synthetic construct
  source 1..110: mol_type = other DNA
agacttaactgaaaaaaaatgaaaccttaaagaaacaagaaaccatggggaaaagattttacaacctggagttcggagttctaaccatgcctccaagccagaagccatta

SEQ ID NO: 75516 - DNA, 110 bp, synthetic construct
  source 1..110: mol_type = other DNA
ggaccaggactttcgggtgttgctgatgtgggtttttcattgtttgctgctgcagttgctattgtaaaaggattactcagcttttaaacagagattttaaaaacgagtag

SEQ ID NO: 75517 - DNA, 110 bp, synthetic construct
  source 1..110: mol_type = other DNA
acacctggtctatacctgcacttccttaagacccacgtgcaggtccctctcccagagtaacagagtcctcaaccgtccaaatcgcacctccggcctgaccagctcctaag

SEQ ID NO: 75518 - DNA, 110 bp, synthetic construct
  source 1..110: mol_type = other DNA
agtaacagagtcctcaaccgtccaaatcgcacctccggcctgaccagctcctaagagcgtgcggctctcggcgggaaacgagaaggatgcccatgggaatcaggttaata

SEQ ID NO: 75519 - DNA, 110 bp, synthetic construct
  source 1..110: mol_type = other DNA
gggaggagctggtctcccccaggagaggctgttggtctctctgttgttccattcggagagttaggatgtttggagatcttaccattttgcgtttcagttgctttgaaagg

SEQ ID NO: 75520 - DNA, 110 bp, synthetic construct
  source 1..110: mol_type = other DNA
gcatgtctgaggccgggagcagctgtccacgcctcatacccaacacgccctgatgtgaccttggtctttaacgtctggacaaaatcacagcttcgaggcttcggacggtg

SEQ ID NO: 75521 - DNA, 110 bp, synthetic construct
  source 1..110: mol_type = other DNA
cccagaagcaccgtgatggtctgctttcaacccatgtaaatacggcagttggaaagacctggggaaaattttggaccagggcagaggaagctgcatggggttccacaggg

SEQ ID NO: 75522 - DNA, 110 bp, synthetic construct
  source 1..110: mol_type = other DNA
gacctggggaaaattttggaccagggcagaggaagctgcatggggttccacagggtagtgtgtgtacctgcagcagatctagagaaatgaagttcttgggtccttggcgc

SEQ ID NO: 75523 - DNA, 110 bp, synthetic construct
  source 1..110: mol_type = other DNA
aagctccgagaggctgggcctgtggttgtggcattgaccgctgcccccctagcacccagcacagcactcagctctcagctggttcccagtaaatgcatgtctgctggtca

SEQ ID NO: 75524 - DNA, 110 bp, synthetic construct
  source 1..110: mol_type = other DNA
cccacactcagccggggaccctgggggaaggtcctggtgggaaaccaaagccaggaggttctgtgcttgaatgttcctaagaaaagacaagttctagaaatgcttggaga

SEQ ID NO: 75525 - DNA, 110 bp, synthetic construct
  source 1..110: mol_type = other DNA
aggttctgtgcttgaatgttcctaagaaaagacaagttctagaaatgcttggagagcctttgggcatgctaattagtcactgaggacgtgggtcagggcaggtggcacaa

SEQ ID NO: 75526 - DNA, 110 bp, synthetic construct
  source 1..110: mol_type = other DNA
gcctgggacacggagaggtgccaccaccccccatccccatctgtagaccagggcctacattctgcagctgcaaagccaggctccccagtccaagggctgggccccagcgt

SEQ ID NO: 75527 - DNA, 110 bp, synthetic construct
  source 1..110: mol_type = other DNA
gggcccttcttcctcccggccgagctgagggcgagcttctcagctcaatggaaagaagggcaggttttaggacacttgaaacacagtccctttctctgcaaagaaacttc

SEQ ID NO: 75528 - DNA, 110 bp, synthetic construct
  source 1..110: mol_type = other DNA
agggatggtctgcaaattcaccatctgatagtgaccgagccagaccggtgggaacacgactttattcgttcattcattcactcttgtgcagccacacccgcggcacagga

SEQ ID NO: 75529 - DNA, 110 bp, synthetic construct
  source 1..110: mol_type = other DNA
cccagcaacacgaaacggcacaggcaccaagcccaaagctgaacaaacgacagtctcctaactagaacattaaaacaaccactggagctcccgtcctggctctgcataat

SEQ ID NO: 75530 - DNA, 110 bp, synthetic construct
  source 1..110: mol_type = other DNA
gcatccttcggcagaacagaatcccaggccacgcgaagtgcagtgcacagacaaaagatgtgacaagatctaggcttgagcacttcgtgcctctggcttaactctttaat

SEQ ID NO: 75531 - DNA, 110 bp, synthetic construct
  source 1..110: mol_type = other DNA
agatgtgacaagatctaggcttgagcacttcgtgcctctggcttaactctttaataactgcacacatccgaaaactaccgcggggctgagatctgaatcctgagcggctc

SEQ ID NO: 75532 - DNA, 110 bp, synthetic construct
  source 1..110: mol_type = other DNA
gccagggcacgtcatcgccaaggttataaagacagcccagcttcacctggagcgtgccctcttggatcaatcactttgggacaagccagctgccaggtcaccagcagccc

SEQ ID NO: 75533 - DNA, 110 bp, synthetic construct
  source 1..110: mol_type = other DNA
taggaggggaagctgagacccacctgcctgcctcccgccagctcaggtcctccggtaaaaatatgactgatactttttataaagtgttcccgtgacaggggagccttcct

SEQ ID NO: 75534 - DNA, 110 bp, synthetic construct
  source 1..110: mol_type = other DNA
caggcgctgttcccgtgatacagagaagacgcacaggatcctgctttcaaagctggtggccggtctaggtgggcatgtcctctgacagaagttggcatgttgtccagcag

SEQ ID NO: 75535 - DNA, 110 bp, synthetic construct
  source 1..110: mol_type = other DNA
ttcctccctgccgaaaccccaagacctagaacattctctggcactgagctgccttcagcaggtatttagcatacagatgaccggatgcctgaggaggccagccgaggcca

SEQ ID NO: 75536 - DNA, 110 bp, synthetic construct
  source 1..110: mol_type = other DNA
cagcgatgcctggagacatggtcccgcccaaaggaggtcacaggtgtgaaccaaacaagggaagggcaattccatgtgcttcatctatgacagacggacacacggggaca

SEQ ID NO: 75537 - DNA, 110 bp, synthetic construct
  source 1..110: mol_type = other DNA
caagggaagggcaattccatgtgcttcatctatgacagacggacacacggggacaaggacatccagaggagaggggacaggtaacccagacgaggggcagagtggtctcc

SEQ ID NO: 75538 - DNA, 110 bp, synthetic construct
  source 1..110: mol_type = other DNA
tggggggtccatttgtattgaatgagtggataatttgggacttccctcagggaaagcaatcaacagctggacaaagaccttcggggcggaatccgaaagaggtgcttcat

SEQ ID NO: 75539 - DNA, 110 bp, synthetic construct
  source 1..110: mol_type = other DNA
gaagcagacatcctccacctcagtgacgtcatctgtgaagaatggggacaaaaatcctgcctgctgaggatagttggaaggcgccaagatttgtgaaagacatgtactta

SEQ ID NO: 75540 - DNA, 110 bp, synthetic construct
  source 1..110: mol_type = other DNA
cctgcctgctgaggatagttggaaggcgccaagatttgtgaaagacatgtacttagcacagtacttggcacagacggagcccgcgggcaaaatccattctgacgtgggag

SEQ ID NO: 75541 - DNA, 110 bp, synthetic construct
  source 1..110: mol_type = other DNA
gtggagaatttcaagtcgtggcggggccgccaggtcataggccccttcaggaggttcacctgcatcatcggccccaacggctccggtaacttgggagctggaaggcttcc

SEQ ID NO: 75542 - DNA, 110 bp, synthetic construct
  source 1..110: mol_type = other DNA
ctggagaagaaaggaaaggcatcagcacagccgagacctcacagcgctgcctccgcaggcagcccagctcccgccacagcctccatctcctcgccaacggctcgggggag

SEQ ID NO: 75543 - DNA, 110 bp, synthetic construct
  source 1..110: mol_type = other DNA
atcaaagagcattaaaagttaaacactgtcctgcgttgccctcaatgccacagaagacacatctgcaaactgcccccgctgagctcacaccccctgcctggtttcaaagg

SEQ ID NO: 75544 - DNA, 110 bp, synthetic construct
  source 1..110: mol_type = other DNA
aagaaacacattttttcttgtgttgagatctatcctcttaacaactcctatacaatgtgcggcatctcctttctatttatcatgtcatccactatacatatttatttatc

SEQ ID NO: 75545 - DNA, 110 bp, synthetic construct
  source 1..110: mol_type = other DNA
tgtgcggcatctcctttctatttatcatgtcatccactatacatatttatttatcttggacttcattgatttatttttttggcctcgcctgtggcatgtggaaaattcct

SEQ ID NO: 75546 - DNA, 110 bp, synthetic construct
  source 1..110: mol_type = other DNA
gaggctgagaaagtggccgagagagaatgtctcacatcttcagcccctgctttatacaagctgggagctattccacaggatggtaggcgttccgctgtgttggagcagga

SEQ ID NO: 75547 - DNA, 110 bp, synthetic construct
  source 1..110: mol_type = other DNA
tgcctacaaaattaaaccttggggaaggacaagcttgagtggagagcttatgtaatttccctgatctcaggtttgctcattgtatttggtttctgttgctgccagtaaca

SEQ ID NO: 75548 - DNA, 110 bp, synthetic construct
  source 1..110: mol_type = other DNA
gcccggctctgaaggcagctccgggccgcctgctggcagagtgatgtcagacaagtggttggaacttgagcctctgtttggtccccagttaagggaggtactggtttggc

SEQ ID NO: 75549 - DNA, 110 bp, synthetic construct
  source 1..110: mol_type = other DNA
tggttggaacttgagcctctgtttggtccccagttaagggaggtactggtttggcctccccggatcctgaaatcaggaggtacagcaggtcagggggtcagggaggagcc

SEQ ID NO: 75550 - DNA, 110 bp, synthetic construct
  source 1..110: mol_type = other DNA
ggcttgcaggggcccagccctctctctcccccggggtagcagcttgggatcagtggagtgtgtgtctgtccgtctgtctgcctgtgtgtctgctttatagaacccaagtg

SEQ ID NO: 75551 - DNA, 110 bp, synthetic construct
  source 1..110: mol_type = other DNA
agcatagtcagtggcacatggagagtaggtgctgtgatgggggtagttggggacccacaaagaggagcaggtgacatctggctggaatgttgtagggcagagagagggaa

SEQ ID NO: 75552 - DNA, 110 bp, synthetic construct
  source 1..110: mol_type = other DNA
cacaaagaggagcaggtgacatctggctggaatgttgtagggcagagagagggaacaccagtggactcctgtgtgaagggaccagcacttggagggggcggggtgtcaga

SEQ ID NO: 75553 - DNA, 110 bp, synthetic construct
  source 1..110: mol_type = other DNA
agaaccggggccccgacatcccagggtggcctggtgttgacacgtctcacttcctgtggggccatctttccttttccgggaacgcccctgtctgtataacgtgggcacgg

SEQ ID NO: 75554 - DNA, 110 bp, synthetic construct
  source 1..110: mol_type = other DNA
gtggggccatctttccttttccgggaacgcccctgtctgtataacgtgggcacggtgcccagggcatgtggacagctcttcactggggctggaatctcgcaatcagttgt

SEQ ID NO: 75555 - DNA, 110 bp, synthetic construct
  source 1..110: mol_type = other DNA
caacttggcaacagctcctcaggggaagcgtgttcaggaatccttcttctccagtaaaattttgtgcaactcatctgcgtcctcgctggttttcacccgaattaacatgg

SEQ ID NO: 75556 - DNA, 110 bp, synthetic construct
  source 1..110: mol_type = other DNA
caaggtctttctagcagacggaatgtcctgctgctgctagctcccttccatgtctaacccaagacgctctggaagcgtctggcattccttagaacgctctctgcccctgg

SEQ ID NO: 75557 - DNA, 110 bp, synthetic construct
  source 1..110: mol_type = other DNA
aacccaagacgctctggaagcgtctggcattccttagaacgctctctgcccctgggaaccgcagagaaaagctcctcagtttaaggtgctttgctgaagtcactgcggtt

SEQ ID NO: 75558 - DNA, 110 bp, synthetic construct
  source 1..110: mol_type = other DNA
gggggtggcaatgacattcctgaagcgttcccagtgctccagggcccttgttgtgttttctcagctttaacaaagtcccttcattaaattctccctgtcagcccatcagc

SEQ ID NO: 75559 - DNA, 110 bp, synthetic construct
  source 1..110: mol_type = other DNA
cggcagctgcagcactgatttgccccctagcctgggaacttccatatgccgtgggtgtggggctaacccccccccaaatgaatctaacacaatcacttcgataagaggag

SEQ ID NO: 75560 - DNA, 110 bp, synthetic construct
  source 1..110: mol_type = other DNA
gctgctaagacctacgccaccccagagacaacaccggatccctgacctgctgcaccccagtgggaactccgttttttgtccgtggcccaaaaaacacccgtggaccatta

SEQ ID NO: 75561 - DNA, 110 bp, synthetic construct
  source 1..110: mol_type = other DNA
gggaattcagccttcctagtcggtggagtcactttgactgctgcctccaccgctggtcactggccctctgtcggctgggtatgtccatgtcacgccacccacaccatccc

SEQ ID NO: 75562 - DNA, 110 bp, synthetic construct
  source 1..110: mol_type = other DNA
ctgtttctaagagatgcacttcctgtgcggagaccaagacaggctgaaaggaatggatgcagaagccaggggtggcggtggcgcctattttaacaccagacaaatcatgc

SEQ ID NO: 75563 - DNA, 110 bp, synthetic construct
  source 1..110: mol_type = other DNA
gatgcagaagccaggggtggcggtggcgcctattttaacaccagacaaatcatgcaagaagggagtctctcccgtgtaaggaaggccactccacagggacaaaaaggtca

SEQ ID NO: 75564 - DNA, 110 bp, synthetic construct
  source 1..110: mol_type = other DNA
atgtgcagtgctcccttctccttgccccacatcacctggtggtgggtctagcttggaatctgttctatctcctttcaggggacacgtggccttcaccttggccccttcgg

SEQ ID NO: 75565 - DNA, 110 bp, synthetic construct
  source 1..110: mol_type = other DNA
cctggggtcccacaggaatccctctccttgaggctgtgcctcccccgccacgtaagctctagggtgtaatgccctctgtcttggcttcctgatctcatggccttgtccca

SEQ ID NO: 75566 - DNA, 110 bp, synthetic construct
  source 1..110: mol_type = other DNA
aggcagggtggcatctttcccggggttttccccgctttggaggcaggcacatctccactgtactggtcagctcttgctgcaatggtgctgtgtaacaaacaacccccaaa

SEQ ID NO: 75567 - DNA, 110 bp, synthetic construct
  source 1..110: mol_type = other DNA
cactgtactggtcagctcttgctgcaatggtgctgtgtaacaaacaacccccaaatctctgtgccttgcagcaaccaaacgtgcttttcctgctgcgggtctggggtttg

SEQ ID NO: 75568 - DNA, 110 bp, synthetic construct
  source 1..110: mol_type = other DNA
ccttcatggcctcatctgaggctcatcacctcccccaccactgctcagcatcatgggtgactcagctaaaggaacatacgtgacagctccaagcagacccccggccaggt

SEQ ID NO: 75569 - DNA, 110 bp, synthetic construct
  source 1..110: mol_type = other DNA
gcctggggcagggcatatacaaagcccaggaggggtctacctgctgagctagctcttcagtgcctggccgtgagctccacctatgccaggactctgaccccctcatcatg

SEQ ID NO: 75570 - DNA, 110 bp, synthetic construct
  source 1..110: mol_type = other DNA
ttcagtgcctggccgtgagctccacctatgccaggactctgaccccctcatcatgacatccacacgaggacccacagagggacaggttttcagctctgtttttactagtg

SEQ ID NO: 75571 - DNA, 110 bp, synthetic construct
  source 1..110: mol_type = other DNA
attgaattcagatgactggctaagttgtttcttacgataccctatcatttggaatatctttgtaaatcaacttgcattcttatgattcctgtgtttcgaacagtagccag

SEQ ID NO: 75572 - DNA, 110 bp, synthetic construct
  source 1..110: mol_type = other DNA
atctttgtaaatcaacttgcattcttatgattcctgtgtttcgaacagtagccagccggctctaagctcgtaagggaacatgccaccgaggcggcggaaggcggccgggc

SEQ ID NO: 75573 - DNA, 110 bp, synthetic construct
  source 1..110: mol_type = other DNA
ggctcaggggcctggaggcagcagcacggggcctggctgcgctcccctggtttgcatttgctcctaaaacatccttctgtcccgcagctcagtctctgtgcctggtcaca

SEQ ID NO: 75574 - DNA, 110 bp, synthetic construct
  source 1..110: mol_type = other DNA
atttgctcctaaaacatccttctgtcccgcagctcagtctctgtgcctggtcacaggatttgatggccttaaaccgctcgctcagggcccaaatcagtttaaaaatgccc

SEQ ID NO: 75575 - DNA, 110 bp, synthetic construct
  source 1..110: mol_type = other DNA
gctgaagcaggggtgaagataggttggcttgacttccggggggagctcttaacctccatgctgccccccctccctgcagacacgtcttaggtgtccgtgtcgggagccca

SEQ ID NO: 75576 - DNA, 110 bp, synthetic construct
  source 1..110: mol_type = other DNA
ccatgctgccccccctccctgcagacacgtcttaggtgtccgtgtcgggagcccaatggtctgtgggctccacgatgcctgtccttcatcacaccattagctgcaaggag

SEQ ID NO: 75577 - DNA, 110 bp, synthetic construct
  source 1..110: mol_type = other DNA
ccaggccttggggtttcgcacggcagagccagaagtctggatttttacaggcaatcacctcgttcttcaatatttgtaaaacattctcccggccaaatgaaacacgactc

SEQ ID NO: 75578 - DNA, 110 bp, synthetic construct
  source 1..110: mol_type = other DNA
cacctcgttcttcaatatttgtaaaacattctcccggccaaatgaaacacgactccgggccaggatcggcccacagaccagccctccgcaccttctcacccagccctccc

SEQ ID NO: 75579 - DNA, 110 bp, synthetic construct
  source 1..110: mol_type = other DNA
tcatttgctgtctctgagccttgactgtttcttgagaattcttccagatttctcagagctggttttatttctcacaagggtctggctgggaccacggctaggggcacttt

SEQ ID NO: 75580 - DNA, 110 bp, synthetic construct
  source 1..110: mol_type = other DNA
gcgaaggtccctgcttggatctaccctctcacgtaacctccctcacccgcccttgccctcccctctccgtagacatccttttccagacccagctcctgggccgttgctcc

SEQ ID NO: 75581 - DNA, 110 bp, synthetic construct
  source 1..110: mol_type = other DNA
ccctcccctctccgtagacatccttttccagacccagctcctgggccgttgctcccacctggcccagagaagcttccttctgcccgtgctcactgctcctcaggcccccc

SEQ ID NO: 75582 - DNA, 110 bp, synthetic construct
  source 1..110: mol_type = other DNA
ttccatttctttcttagatcgactatggattcattttttttcatcaatggtggttaaggacccgggcccccatcgaggccgttggtcatcggccagccacaggcctgcat

SEQ ID NO: 75583 - DNA, 110 bp, synthetic construct
  source 1..110: mol_type = other DNA
aatggtggttaaggacccgggcccccatcgaggccgttggtcatcggccagccacaggcctgcatcccggacaggcactgtccccgggaggcctggccggggctgtgtct

SEQ ID NO: 75584 - DNA, 110 bp, synthetic construct
  source 1..110: mol_type = other DNA
cttcagccctcaagacaagccccatcatcctgatggccttgcgttgtcaccaaaggtctggatggttgtcgttgtgtctcatgcattcattgagcaaatgttgatgagaa

SEQ ID NO: 75585 - DNA, 110 bp, synthetic construct
  source 1..110: mol_type = other DNA
gtctggatggttgtcgttgtgtctcatgcattcattgagcaaatgttgatgagaacacactgcagcgggcaagccagtcagtcaccatcctgctgtcacagagtctgcat

SEQ ID NO: 75586 - DNA, 110 bp, synthetic construct
  source 1..110: mol_type = other DNA
agggggaggacgtcccagggagagtggcaggtggcacagcggctcagaggagggaaggagatgttagctatggctggagtcaagagacagagatgacaccagaaagttca

SEQ ID NO: 75587 - DNA, 110 bp, synthetic construct
  source 1..110: mol_type = other DNA
aggagatgttagctatggctggagtcaagagacagagatgacaccagaaagttcaggtgccagccccatagcagttggaagccaaggaatttggatgcggtcctggaggc

SEQ ID NO: 75588 - DNA, 110 bp, synthetic construct
  source 1..110: mol_type = other DNA
gatttcctccctggtgtttgcatttgcatgcacatcttttgtgcataggatcgatttacttgctataaggctttactgcgtgtccggtgtggattccgcaccatgtcagg

SEQ ID NO: 75589 - DNA, 110 bp, synthetic construct
  source 1..110: mol_type = other DNA
ttacttgctataaggctttactgcgtgtccggtgtggattccgcaccatgtcaggtcctggtgtggggaggactggggcaaagcatggccagagtcctgagaactgaggt

SEQ ID NO: 75590 - DNA, 110 bp, synthetic construct; identical to SEQ ID NO: 75588
  source 1..110: mol_type = other DNA

SEQ ID NO: 75591 - DNA, 110 bp, synthetic construct; identical to SEQ ID NO: 75589
  source 1..110: mol_type = other DNA

SEQ ID NO: 75592 - DNA, 110 bp, synthetic construct
  source 1..110: mol_type = other DNA
caagagattcctgaagggaaggcttttgtgacagtgtggaggtcgcttgcaggaaagatccagtccaggagctgggatgtgtggtgtctaaacgccacggtggcagggaa

SEQ ID NO: 75593 - DNA, 110 bp, synthetic construct
  source 1..110: mol_type = other DNA
ggtggaccgctgcctctccgcaacagcaaagacatgtaataaatgatggacgagccaccctgtctcaatgatgtgaggtcaccgggttgccacagctggcacagcatgtc

SEQ ID NO: 75594 - DNA, 110 bp, synthetic construct
  source 1..110: mol_type = other DNA
caccctgtctcaatgatgtgaggtcaccgggttgccacagctggcacagcatgtcctgcctcaccccaaatcacttctggagatgctccagcccccgcaagcaggacttg

SEQ ID NO: 75595 - DNA, 110 bp, synthetic construct
  source 1..110: mol_type = other DNA
tttttgcagatcaggaaacagatttagagaaagcaagtgacttgcccaatgccagtccagtcagatggaggcagagccaggcgttcaaactcatgctcaataagcactca

SEQ ID NO: 75596 - DNA, 110 bp, synthetic construct
  source 1..110: mol_type = other DNA
tccagtcagatggaggcagagccaggcgttcaaactcatgctcaataagcactcaggaacttattactgaacgaatgaagagctttcattggtccatgttctacaatgat

SEQ ID NO: 75597 - DNA, 110 bp, synthetic construct
  source 1..110: mol_type = other DNA
gggccagactgcctgggttccaattctggctccaccactagctggctctgagaccatgggtgtgtgactgtggttctcttgctctcactaactacagtgactcaccaact

SEQ ID NO: 75598 - DNA, 110 bp, synthetic construct
  source 1..110: mol_type = other DNA
tgctcaaatgccacaaacattcacccttaacaagtcttagtagattctcttgaataaatacttctttatttgcagtaggttggcctttaggagtatctccagagatttaa

SEQ ID NO: 75599 - DNA, 110 bp, synthetic construct
  source 1..110: mol_type = other DNA
gcaaaatccaaaatgtcggaaagcaatctggtatttccagcaaataaaaaagaaaagaggaagtaagaatctgtagattaaatgagatttaagagacatcagtgaaatac

SEQ ID NO: 75600 - DNA, 110 bp, synthetic construct
  source 1..110: mol_type = other DNA
tccagcaaataaaaaagaaaagaggaagtaagaatctgtagattaaatgagatttaagagacatcagtgaaatacatgtgttgtctctcttggactctgatttgaataaa

SEQ ID NO: 75601 - DNA, 110 bp, synthetic construct
  source 1..110: mol_type = other DNA
aagttgatgttaccattccctgtgacaacccctgcactccctaacttggtacccgttgcctaaccagaaaattaggagtcattctcattcctcttggtctgtattcctca

SEQ ID NO: 75602 - DNA, 110 bp, synthetic construct
  source 1..110: mol_type = other DNA
ggggtattattaatacggggatgatctgaacatgcaggagaaaggaagccacaagtatccaagacattttaaaaataagcatcctgctgaaaagagtggcactctgcatc

SEQ ID NO: 75603 - DNA, 110 bp, synthetic construct
  source 1..110: mol_type = other DNA
gccctcaagggacaaaagaccagaaaaaaaaaaaaaagaataagaaattcaagaaacatttaaacaggtgacaggatacacaagtttacatccttaaagagatgtaaaaa

SEQ ID NO: 75604 - DNA, 110 bp, synthetic construct
  source 1..110: mol_type = other DNA
agttaagtgcccaggtatctgactgcagctgaacagaagccagttgtcccagtctgcccagaccctgctttctggatggtcagatcctggagcctgtattactgcctagg

SEQ ID NO: 75605 - DNA, 110 bp, synthetic construct
  source 1..110: mol_type = other DNA
gcccagaccctgctttctggatggtcagatcctggagcctgtattactgcctaggagcctccatcactggttaattgaattcaacctaatcttcaagatgccatgagtgt

SEQ ID NO: 75606 - DNA, 110 bp, synthetic construct
  source 1..110: mol_type = other DNA
cctctcttgtggttacacgttctccacagtgtgccggtggcccctcagtctccatttggtgtgtctggcacacagcactcactcacagcactttcgtggctcttgcactc

SEQ ID NO: 75607 - DNA, 110 bp, synthetic construct
  source 1..110: mol_type = other DNA
attataaaacttttacagagaaaagaaggctgacacaagagtactcggtgaaaagtttattttaaaatgtattgtccacagcacatctaggtggagtcctatatttagaa

SEQ ID NO: 75608 - DNA, 110 bp, synthetic construct
  source 1..110: mol_type = other DNA
tccgtcaacccctggacagcatttaggtcattatcaagacccctgagtggcccattttaccacaggactccccagccctgactcttcgtggctggggagagaacctggac

SEQ ID NO: 75609 - DNA, 110 bp, synthetic construct
  source 1..110: mol_type = other DNA
agcatggtgcctggcacatcatcacttcctacctttccatctgtccagggagacgaagcaaacctttgtcgccagaccacagtgcaaggtcatgtaagcacacaccaggc

SEQ ID NO: 75610 - DNA, 110 bp, synthetic construct
  source 1..110: mol_type = other DNA
tccgggctaggctgggcagagaactggggacagctgcaggcaagggtctgcaaagaaggaagtttgggccacagaatacgtgctctcagatggacaggtggggttgtgtg

SEQ ID NO: 75611 - DNA, 110 bp, synthetic construct
  source 1..110: mol_type = other DNA
ctctctgaatcatcacacctggccatggctgagttcccagcagatgccagtgaatgtgaaatggggtttcatccaacccatcatggagttcccattgaggcacagcagaa

SEQ ID NO: 75612 - DNA, 110 bp, synthetic construct
  source 1..110: mol_type = other DNA
gccagtgaatgtgaaatggggtttcatccaacccatcatggagttcccattgaggcacagcagaaacgaatctgactggtaactaagaggtttctggtttgatccctggc

SEQ ID NO: 75613 - DNA, 110 bp, synthetic construct
  source 1..110: mol_type = other DNA
ttgctctcgttactgggatagaaaaccaagagggagttccctgcatactttctataatgctttttaatgtttctcaagctggaacagggttcctcaggcctgatgagttt

SEQ ID NO: 75614 - DNA, 110 bp, synthetic construct
  source 1..110: mol_type = other DNA
ggtttacagagaagttgtaaagtcggtagagagctcccagacaccttccacccagcttctagtgctaacaccttgcataatcacagaacaattgccaaaactaagaagtg

SEQ ID NO: 75615 - DNA, 110 bp, synthetic construct
  source 1..110: mol_type = other DNA
cttctagtgctaacaccttgcataatcacagaacaattgccaaaactaagaagtgacatctgtacagcactattgactaaactgcagactttattcagatttcacctttt

SEQ ID NO: 75616 - DNA, 110 bp, synthetic construct
  source 1..110: mol_type = other DNA
ccaggtgtgatttcctcatgccaaggccaggcagccttggtgtctgaactggtatctgcttcccagacccgggagggctttgccccggccctgggctctgtggatgttgg

SEQ ID NO: 75617 - DNA, 110 bp, synthetic construct
  source 1..110: mol_type = other DNA
taaaatgtgatttatttgcagatataaaacacaaagtccagcacaggaccgcataccacttttcccaggcagtgggtgctagggctctggctgggggagaataacttaga

SEQ ID NO: 75618 - DNA, 110 bp, synthetic construct
  source 1..110: mol_type = other DNA
ggcgtgaggataagccagatacggttcccagtgtggggaagcccaggtgatggatgtgtgagagtccagggaagtgggcctgacactgctgtgctgggcaggtccctggg

SEQ ID NO: 75619 - DNA, 110 bp, synthetic construct
  source 1..110: mol_type = other DNA
gaggatctcccccctccccacggggcatcctgattagagtggtggtggcttgggttcccacggcaaggacctataggaagcattgggtgcctgatcttggaatctctcca

SEQ ID NO: 75620 - DNA, 110 bp, synthetic construct
  source 1..110: mol_type = other DNA
tcccacggcaaggacctataggaagcattgggtgcctgatcttggaatctctccagcctcattctcctgctccgccattaagacctgggtcagccaccctccccaggggc

SEQ ID NO: 75621 - DNA, 110 bp, synthetic construct
  source 1..110: mol_type = other DNA
gacaagcagccaggtggaacatggtgagaaagacaagctctccagagggttctaagggcactgctccccatcctaggactggcgaaaatcatcctgatgcaattaccttg

SEQ ID NO: 75622 - DNA, 110 bp, synthetic construct
  source 1..110: mol_type = other DNA
gggcactgctccccatcctaggactggcgaaaatcatcctgatgcaattaccttggtcacccggaagaactgagggcacactcgggagagtgggtgagaatttaatacta

SEQ ID NO: 75623 - DNA, 110 bp, synthetic construct
  source 1..110: mol_type = other DNA
gcgtgaacaagtgctgggaggcaggaagcgagggctttacctggaaagggaatcggcttggctggtgggtgaggggaggacatgggagtagctggaagagcctgaggtct

SEQ ID NO: 75624 - DNA, 110 bp, synthetic construct
  source 1..110: mol_type = other DNA
gctgctgggctgatctttctgggtggagctggttaagggggcaggtgccaaccggccttccccttccaagacagagcctcctggtggatcagcctgaatcttgggcctca

SEQ ID NO: 75625 - DNA, 110 bp, synthetic construct
  source 1..110: mol_type = other DNA
cagcacacttaatgcgacagctttggtctggagtcagcttcagaatggactgggagtcacagcagcggcttgggttgctgctgtggcagggatttgatcctcttccacgt

SEQ ID NO: 75626 - DNA, 110 bp, synthetic construct
  source 1..110: mol_type = other DNA
atcagagaactattctctctgccttgaaaacaaaggaattgataagtgactaacccagggcaggaatctcagacagtttggacagaatcaggactctgtccttgctctat

SEQ ID NO: 75627 - DNA, 110 bp, synthetic construct
  source 1..110: mol_type = other DNA
ctaagaaatgaagcccctgggtgcatggaagcccttcctgccactcccactcctgcctttccccatctcaggtcaacaccctcttaaattctgtgcttgactttatagtt

SEQ ID NO: 75628 - DNA, 110 bp, synthetic construct
  source 1..110: mol_type = other DNA
atgcactgggacgggtcagtaagcgggtgaatgaatgaatgaatgacccgctttctttcaggagccagcagtccggctgaggtgggcgagccaggcggcaggtccgaagt

SEQ ID NO: 75629 - DNA, 110 bp, synthetic construct
  source 1..110: mol_type = other DNA
tttcaggagccagcagtccggctgaggtgggcgagccaggcggcaggtccgaagtgggattttcacttagtggtttcatagctaagaggctaaaccatcttttctctgtc

SEQ ID NO: 75630 - DNA, 110 bp, synthetic construct
  source 1..110: mol_type = other DNA
tgtcagatggtcccaccggcctagccattagatcccaggggaaagacagaagaacctcacccggctcctaggcctggttttcactccagggttaattaccagagaatctc

SEQ ID NO: 75631 - DNA, 110 bp, synthetic construct
  source 1..110: mol_type = other DNA
gaccatgaactggtcctctttttaaaaaattctttaatttgaacataactattagctcctctttccgcttcataaaacagtatttcacatctcagaaaacttgaaaaata

SEQ ID NO: 75632 - DNA, 110 bp, synthetic construct
  source 1..110: mol_type = other DNA
cagaggtaggagggagttggactagctgagctgacttttagggccctactactctggctgtctgcactctggatcatgaaaagcctcagaatctgagtctgttggttaag

SEQ ID NO: 75633 - DNA, 110 bp, synthetic construct
  source 1..110: mol_type = other DNA
ggctgtctgcactctggatcatgaaaagcctcagaatctgagtctgttggttaagtggattggctgggtaaagggtatttgcataaagggacatatagcatgtgtcctct

SEQ ID NO: 75634 - DNA, 110 bp, synthetic construct
  source 1..110: mol_type = other DNA
ggccagcctctgtctattgcttgcaacctaactcctgtactgcatgtgctttcacatacagagtgtctgcttccagagagttttaggtgttattgcataggaatgactaa

SEQ ID NO: 75635 - DNA, 110 bp, synthetic construct
  source 1..110: mol_type = other DNA
atcctctggccagccttgctgtgctcaaagcaccagctaccatctgccacgttatatagaccttgttgttcattatctctcctgctagaatgtaagcctcacaaacgttc

SEQ ID NO: 75636 - DNA, 110 bp, synthetic construct
  source 1..110: mol_type = other DNA
atagaccttgttgttcattatctctcctgctagaatgtaagcctcacaaacgttctactatggctgtaggccaagcaatcagaagagagcctggcagatagcaggcccct

SEQ ID NO: 75637 - DNA, 110 bp, synthetic construct
  source 1..110: mol_type = other DNA
agagttgtcagcagggctgtgcatcacctggaagttctagtgagggaactttccttccctcctccagtttctggtggcagccggtattcctcatctgtggcttcatctct

SEQ ID NO: 75638 - DNA, 110 bp, synthetic construct
  source 1..110: mol_type = other DNA
tccctcctccagtttctggtggcagccggtattcctcatctgtggcttcatctctctgacctcttcttcaatcttcacagggcctccttctgctgtgtgtgtgtgtgtgc

SEQ ID NO: 75639 - DNA, 110 bp, synthetic construct
  source 1..110: mol_type = other DNA
taaacaccccaagtggtatagaaccctgcaggggttcaaagaggagaaagaggaacttctgtgagctggagtggaccagaaaggcctcttggaggaggtaatgggtttta

SEQ ID NO: 75640 - DNA, 110 bp, synthetic construct
  source 1..110: mol_type = other DNA
gagctttgcagcactttctcaattctctgaatttctctgctaccatctctctccacacagggatatcaccatgcttggggaacgtctgacgtcacactgcagctacagga

SEQ ID NO: 75641 - DNA, 110 bp, synthetic construct
  source 1..110: mol_type = other DNA
cacagggatatcaccatgcttggggaacgtctgacgtcacactgcagctacaggaaatttaccacctctttttatccttctgtggtctgtgcacatggtgtgtagtacca

SEQ ID NO: 75642 - DNA, 110 bp, synthetic construct
  source 1..110: mol_type = other DNA
tgccacctctccactttgggcatgtctggcacatgaaaatataggcacagggtgcccacagatttggcctggagagcagatgatgtcatcctctgattaagttagttcca

SEQ ID NO: 75643 - DNA, 110 bp, synthetic construct
  source 1..110: mol_type = other DNA
gcagtgcagaccctcctctccataatggccacctttcttgcagcactaacctttagcaaggctactgtgtgccagtgagctaatccagagagccagcctggtcaagacat

SEQ ID NO: 75644 - DNA, 110 bp, synthetic construct
  source 1..110: mol_type = other DNA
attgtcttgtttatctgtctccatccaccggggcagaaagtacatcttattcacctggggaatcaccagctcccactgtctctgcctgagagaggaggataggggagtct

SEQ ID NO: 75645 - DNA, 110 bp, synthetic construct
  source 1..110: mol_type = other DNA
tggggaatcaccagctcccactgtctctgcctgagagaggaggataggggagtctcctcctcctgcttaatctaaatgtccttcccttctagggaaagtagctcagatcc

SEQ ID NO: 75646 - DNA, 110 bp, synthetic construct
  source 1..110: mol_type = other DNA
aaaaatctctccctcacccatatgatttattcccatatgagaattctatttgttccatctccatactgtacttgccacacacgtaatagttttgacaggtgtcaccttac

SEQ ID NO: 75647 - DNA, 110 bp, synthetic construct
  source 1..110: mol_type = other DNA
catctccatactgtacttgccacacacgtaatagttttgacaggtgtcaccttacttttcttgaaagagtaacatgcctcaccctatccctgtgtgtaccctttcacctc

SEQ ID NO: 75648 - DNA, 110 bp, synthetic construct
  source 1..110: mol_type = other DNA
gtgggttaaggatccagcattgccgcaagccttggtgttggctgcatatgtggcttggatcccacgttgccgtggctgagtcgtaggctggcagctgcggctctgattcc

SEQ ID NO: 75649 - DNA, 110 bp, synthetic construct
  source 1..110: mol_type = other DNA
agcattgccgcaagccttggtgttggctgcatatgtggcttggatcccacgttgccgtggctgagtcgtaggctggcagctgcggctctgattccatccctcgcctggga

SEQ ID NO: 75650 - DNA, 110 bp, synthetic construct
  source 1..110: mol_type = other DNA
atgaatggctggggatgatgtcaaagaggttggtagctggagcatcccaagctgcagaaccctactgtggaacccacggagacgtttgttttttccttgcaatttgcaag

SEQ ID NO: 75651 - DNA, 110 bp, synthetic construct
  source 1..110: mol_type = other DNA
ccgtctaaggcagagccccagagagaagacatactaacaaaataggggagacaccaaggggaccatgttagtagctcttgtcagaccctcacgactccaggctgcttgga

SEQ ID NO: 75652 - DNA, 110 bp, synthetic construct
  source 1..110: mol_type = other DNA
actaaaaacaagaaatatatacaagacagagaaggagagggagaaagagagaacgagggatgaagtataattgcgtgtataatgtatttacttagctcaacgcttggcac

SEQ ID NO: 75653 - DNA, 110 bp, synthetic construct
  source 1..110: mol_type = other DNA
ttccatatctctggggtttcccttttaatctgattacagtttgcaaaacgccagcttacactttttattagcagcactcggtgactgtgactgtttgggagagacgtctg

SEQ ID NO: 75654 - DNA, 110 bp, synthetic construct
  source 1..110: mol_type = other DNA
caggcatttgttagatcattggttcccagccttgcctgcacatgcaatgacctggggagctttaaaaatattgaagactgagtcttacctccagagttgccgatttaagt

SEQ ID NO: 75655 - DNA, 110 bp, synthetic construct
  source 1..110: mol_type = other DNA
aaggtctcgttggacgaagccctggcaggaagacacaagagacaaagtcatcggttcttcctgggttgctaggtccgggcatggaaggggagacagaaactgcgtttact

SEQ ID NO: 75656 - DNA, 110 bp, synthetic construct
  source 1..110: mol_type = other DNA
gaatatatggggaaggagatggtttccacggattgcctgttccccaccccgaacccctgctattctgggacctgagctttgtcctggctggtttgagaggtctcccaagc

SEQ ID NO: 75657 - DNA, 110 bp, synthetic construct
  source 1..110: mol_type = other DNA
atcctgcacccacgtttctctattcctgcccacccccactttcctcacaccatttctgcacctggtctagacatgcaaagctaccttggaacagctacagctgtgataca

SEQ ID NO: 75658 - DNA, 110 bp, synthetic construct
  source 1..110: mol_type = other DNA
ctgcacctggtctagacatgcaaagctaccttggaacagctacagctgtgatacaagaagggtactagtaatactaaagaacagaagaaggttcttttttttggcgggta

SEQ ID NO: 75659 - DNA, 110 bp, synthetic construct
  source 1..110: mol_type = other DNA
gttttagccttcaagttagaagtgaaaagaggtaaaatgactggttcaagtcaatggcagagccaggacaaggacctgactcattcctagttcagctcactttccttcgc

SEQ ID NO: 75660 - DNA, 110 bp, synthetic construct
  source 1..110: mol_type = other DNA
tggagggtcaagtggtcacaacccgaaccagctgatgattctttgcatcacaatagctgaataaccagaaattttgtgctttctactatggtatggtgtgaagcacacaa

SEQ ID NO: 75661 - DNA, 110 bp, synthetic construct
  source 1..110: mol_type = other DNA
gaaggagatggattctccttctgccactggcatgaccaggatgagccactttaccatcgggtcccagttttttccctgtaaggtgaagaagttggactttgttaagatcg

SEQ ID NO: 75662 - DNA, 110 bp, synthetic construct
  source 1..110: mol_type = other DNA
atcgggtcccagttttttccctgtaaggtgaagaagttggactttgttaagatcgcttttctcactggattctgggtttttaactgttcatctggggcttgtgttaaatc

SEQ ID NO: 75663 - DNA, 110 bp, synthetic construct
  source 1..110: mol_type = other DNA
gcctatgtccatgtggtcacccgtttcattcaggtaagagcagttttctcttttagttgctatggcacaaattgcattaggaagaagctagctccgtagggtggtacaaa

SEQ ID NO: 75664 - DNA, 110 bp, synthetic construct
  source 1..110: mol_type = other DNA
gttgctatggcacaaattgcattaggaagaagctagctccgtagggtggtacaaacctttgcccctccttaatccttttcagtattttggaatctgaacccagccaaagc

SEQ ID NO: 75665 - DNA, 110 bp, synthetic construct
  source 1..110: mol_type = other DNA
tctggaccaccggcaaacataggcagtcaggctagtttagtccagtctttgtacaatgttcaaaacccgagctgtatgtctggtgcaagtaggcttgtcggtgttctatt

SEQ ID NO: 75666 - DNA, 110 bp, synthetic construct
  source 1..110: mol_type = other DNA
atgttcaaaacccgagctgtatgtctggtgcaagtaggcttgtcggtgttctattgctgagagatcagagccaaagaggcaggcatgagtccggggcaggtacagaggga

SEQ ID NO: 75667 - DNA, 110 bp, synthetic construct
  source 1..110: mol_type = other DNA
tgctaataccaaattctcttgatagaataatggtggctttaatgaaatgtttgaatgctaatgaatgttcctttctgctttgctaacaggcttttaaatacttgagagaa

SEQ ID NO: 75668 - DNA, 110 bp, synthetic construct
  source 1..110: mol_type = other DNA
tgctaatgaatgttcctttctgctttgctaacaggcttttaaatacttgagagaagaagttaaaacatttcagggcaagccaattatggtaagaaacacttgtaagtagg

SEQ ID NO: 75669 - DNA, 110 bp, synthetic construct
  source 1..110: mol_type = other DNA
actatgggtggtggttccagggtttgctatttcagcagatcaattctggcaggttctaggtaatgtctcttcacttctcttagctctctctttacagtgccaaggtgact

SEQ ID NO: 75670 - DNA, 110 bp, synthetic construct
  source 1..110: mol_type = other DNA
accaccttgtctaaagcagctctccccacccccaatgcctgttattctattgcataactttgcaatttacttctcagcagctatcataacctgtgatggtcttatttgct

SEQ ID NO: 75671 - DNA, 110 bp, synthetic construct
  source 1..110: mol_type = other DNA
aactttgcaatttacttctcagcagctatcataacctgtgatggtcttatttgcttgcttattgtctctacactagatagtaaggctcaggaggacagactctgtttgtc

SEQ ID NO: 75672 - DNA, 110 bp, synthetic construct; identical to SEQ ID NO: 75670
  source 1..110: mol_type = other DNA

SEQ ID NO: 75673 - DNA, 110 bp, synthetic construct; identical to SEQ ID NO: 75671
  source 1..110: mol_type = other DNA

SEQ ID NO: 75674 - DNA, 110 bp, synthetic construct
  source 1..110: mol_type = other DNA
gccaggcatgaaatatctgttcctacttgtcaactgcttgaatgaattattatgttaatttctcaagagtaaggtgggtagctgttcagagtaggaaagaacatgtgata

SEQ ID NO: 75675 - DNA, 110 bp, synthetic construct
  source 1..110: mol_type = other DNA
ctagcgctcctgagagctgcgagacaggctcccccgggcctcctcttttcccttctggcgggtggtgggcgttagagaccgcaatgtctcttatccgtttgtctgacatt

SEQ ID NO: 75676 - DNA, 110 bp, synthetic construct
  source 1..110: mol_type = other DNA
tggcgggtggtgggcgttagagaccgcaatgtctcttatccgtttgtctgacattgactgtccgaagccttggtttcaggtgtgacccctctgagattaatatatctgat

SEQ ID NO: 75677 - DNA, 110 bp, synthetic construct
  source 1..110: mol_type = other DNA
ctcttgaaacccctccaaccaggctttcacacctagcactccagcccctccccgtgggcatgctgttcgctctgatggccagtcctcagctcagaagccttggactcagc

SEQ ID NO: 75678 - DNA, 110 bp, synthetic construct
  source 1..110: mol_type = other DNA
ttacacgtgtaggtataaatctttaaattccttccataggaatttttatcctgctcctaataggtccaagatttgtaacagccatttccctgttggtttggtgtggtgtt

SEQ ID NO: 75679 - DNA, 110 bp, synthetic construct
  source 1..110: mol_type = other DNA
tgctgggctgctttcatgcaccttctatggctccctactgcccactccataagtccaaactcctcagctccacgcgttcccccacttgaagcaccctttcctcccctcca

SEQ ID NO: 75680 - DNA, 110 bp, synthetic construct
  source 1..110: mol_type = other DNA
ccacgtacacaggacgtggcaagggtcaaagctttcccagctgtgaccacactggtctcctcattggacctgagtggatgcctttactgccatcactcccagagttcctg

SEQ ID NO: 75681 - DNA, 110 bp, synthetic construct
  source 1..110: mol_type = other DNA
gcgtcccctgggggtttcattagatgctttcagcacacaccattcctcccaccctcagcccccatctctccctttctcatcatttaaagctttccctctcttttatctct

SEQ ID NO: 75682 - DNA, 110 bp, synthetic construct
  source 1..110: mol_type = other DNA
cagcccccatctctccctttctcatcatttaaagctttccctctcttttatctctttcaagccttcctgcattgggttgcctggggataatggttggaggaggcaggaaa

SEQ ID NO: 75683 - DNA, 110 bp, synthetic construct
  source 1..110: mol_type = other DNA
gcagaggaaagggacgaggatgggcctcacatttgtctacttttctccttccctctccaaggctgatgctggaatttgacctactgatcttcaacttcggacagctgccc

SEQ ID NO: 75684 - DNA, 110 bp, synthetic construct
  source 1..110: mol_type = other DNA
tccaaggctgatgctggaatttgacctactgatcttcaacttcggacagctgcccttggcgctgatgacatgggtccccatgttcctgtccactctgctggttccctacc

SEQ ID NO: 75685 - DNA, 110 bp, synthetic construct
  source 1..110: mol_type = other DNA
agagctcctttattgaaggaaggatggaaagtgatgagctgagcctgggctccaggctccccctggatgatgccactgggggaagaaggaaaggtcgggggctgctggtg

SEQ ID NO: 75686 - DNA, 110 bp, synthetic construct
  source 1..110: mol_type = other DNA
cgtatgctatgggtgtggccaaaaaaaaaaaaaaaagttaatctggtaactgctagagctatacttggagggaatatgttttataggctatcagaagcaaaacgtcaata

SEQ ID NO: 75687 - DNA, 110 bp, synthetic construct
  source 1..110: mol_type = other DNA
aacatagttgcctgtgctctacagcaggacctcattgcttatgttttggctaatgggatgtgaacagatgtgacccatgccgtgtttgaacatgtgaatttacactttct

SEQ ID NO: 75688 - DNA, 110 bp, synthetic construct
  source 1..110: mol_type = other DNA
aaagacctaaatgtaagagctgaaaatatgacactcttagaaaaaagcataggtgtaaatcttcatgattttggatcaggtaatggtttcttagataaaggcaaaataag

SEQ ID NO: 75689 - DNA, 110 bp, synthetic construct
  source 1..110: mol_type = other DNA
ggactatgcagtgtgctctgcagaccacggggacaccaggccacctttcagttggtccaagagtccacccagaatttgtccttcaaacacatgtgtctggtttgcgtttt

SEQ ID NO: 75690 - DNA, 110 bp, synthetic construct
  source 1..110: mol_type = other DNA
ctcacaattgtcatcattctctttccattaggcaggggggggttcctgctgcctgagagacatctccccttagagctttgccgctcagaatggaatcggagaactgacag

SEQ ID NO: 75691 - DNA, 110 bp, synthetic construct
  source 1..110: mol_type = other DNA
agagacatctccccttagagctttgccgctcagaatggaatcggagaactgacagcgtcagcagccctggaaacgtgctacaaatgcaaactctcaggtgccagcccaga

SEQ ID NO: 75692 - DNA, 110 bp, synthetic construct
  source 1..110: mol_type = other DNA
cagatccttctgtcttgatagtccttctttccagtttcttggctggagtgtggctgaggatggccaccagccatgagggagaaaggatctcagaactgctttttgtaaac

SEQ ID NO: 75693 - DNA, 110 bp, synthetic construct
  source 1..110: mol_type = other DNA
gggaagggtcttccgaacctttcattgtgggtgtggtcctcgtcaccttcttctgttgccgtggagacatggacaaagtgggctgtgaagggcacagagcacaggtgggc

SEQ ID NO: 75694 - DNA, 110 bp, synthetic construct
  source 1..110: mol_type = other DNA
taatgcataaaatatttactgaaaaccaagccttttccctaaggagcggctctgaaggcccctctccaggaagccacctttatgctgggtcttctatttacatcaccctc

SEQ ID NO: 75695 - DNA, 110 bp, synthetic construct
  source 1..110: mol_type = other DNA
aggcccctctccaggaagccacctttatgctgggtcttctatttacatcaccctcctttctttgcctgattgttgcaatgacaattaaaccatttagatcgtctctgttg

SEQ ID NO: 75696 - DNA, 110 bp, synthetic construct
  source 1..110: mol_type = other DNA
tgtatctcactgaggtttccatttgcatttctgtgaatattattgatattccacatctttttatatacccgatggccttttttgggggaggggctttttttctttttatg

SEQ ID NO: 75697 - DNA, 110 bp, synthetic construct
  source 1..110: mol_type = other DNA
catttctgtgaatattattgatattccacatctttttatatacccgatggccttttttgggggaggggctttttttctttttatggctgcacctgtggcacatggaggtt

SEQ ID NO: 75698 - DNA, 110 bp, synthetic construct
  source 1..110: mol_type = other DNA
taaaacaagctagccttcattcacaaggtaaataggaatgaaattctaacttactggacaaaatacatcagccaacctgtgtcaagaactaaggatcacacaaacaaaaa

SEQ ID NO: 75699 - DNA, 110 bp, synthetic construct
  source 1..110: mol_type = other DNA
caggatgatgccccacgatcacaactcttaagaaatcatctcactcattacccatgcctggtaatcacgagcttttcctcacacctgatccaggaagatacaactgacta

SEQ ID NO: 75700 - DNA, 110 bp, synthetic construct
  source 1..110: mol_type = other DNA
cttcctgacacatctttttccagactagctgtacttcttgatggcctctagagcgacttgatgctttcctgcctctatgcctttgttcctgctgttcctttaagaatgaa

SEQ ID NO: 75701 - DNA, 110 bp, synthetic construct
  source 1..110: mol_type = other DNA
actgagccacagtaggaactttgtatttgtatactttaaacggatgatttttatggacatgagttatctcagtaaaaaagttaaaaaatttccagttgaaaaggtagatt

SEQ ID NO: 75702 - DNA, 110 bp, synthetic construct
  source 1..110: mol_type = other DNA
catacaggtctgagcagaaccaccctgtgaagcttttgtgactcaaataaattccccagactctacaaaagttatcccacttttaaaccctctagataaataattttcaa

SEQ ID NO: 75703 - DNA, 110 bp, synthetic construct
  source 1..110: mol_type = other DNA
tgctataaagactgcacatacgatgcactcctaatccttacctgtgtctcctgacgcaaactggtgtcttcactctctttctcaatttcttccttgcttggagtctttga

SEQ ID NO: 75704 - DNA, 110 bp, synthetic construct
  source 1..110: mol_type = other DNA
aatcccaggctcccaccccccaggctctcttgtagtttagacttgaccaatgggcagctgggaagtgggtaagtttcatgtcttttgagactgcctacctctgtctcctc

SEQ ID NO: 75705 - DNA, 110 bp, synthetic construct
  source 1..110: mol_type = other DNA
agagacccagctctgccttggaagctcaaactctcttgcttgttactccttgattttgtcatgctctggctcttcactgaacatcctctcttctgactccttttatgttt

SEQ ID NO: 75706 - DNA, 110 bp, synthetic construct
  source 1..110: mol_type = other DNA
ttgtcatgctctggctcttcactgaacatcctctcttctgactccttttatgttttgaaaacagtaggaggagctctttggataggatggagctgtagccatcctttgat

SEQ ID NO: 75707 - DNA, 110 bp, synthetic construct
  source 1..110: mol_type = other DNA
attgtcaaagcaaccctgaggaataaataaaacgagcaggaggcataactcttccaaaccagacagtattacaaagctccagtcattaagaaagtgtggtactggtacaa

SEQ ID NO: 75708 - DNA, 110 bp, synthetic construct; identical to SEQ ID NO: 75707
  source 1..110: mol_type = other DNA

SEQ ID NO: 75709 - DNA, 110 bp, synthetic construct
  source 1..110: mol_type = other DNA
tttacaacctgggaccctcaaggaacatttgagaagatcctggtttgctgagctaaaaatgctttcttctcccttccttcatcctccaccaccccaatgagatatgtgct

SEQ ID NO: 75710 - DNA, 110 bp, synthetic construct
  source 1..110: mol_type = other DNA
atgaatctacaaaaagtattctagctgttagaaaggtatctgggaatatactcaccacggtgtgaatgaatatgaaattgctcctgtggggaagactctcagatcccctg

SEQ ID NO: 75711 - DNA, 110 bp, synthetic construct
  source 1..110: mol_type = other DNA
ccacgatgggctgtgtgcctgggcagcaggagctgggcggtcagagggtgggttctgatcttggcgagaagcaaacatgactcagtaatgcagcagcctctagggatgct

SEQ ID NO: 75712 - DNA, 110 bp, synthetic construct
  source 1..110: mol_type = other DNA
cacctttctgtagccagtgctcaggtctagcaggtctcagtcctgtttcagaatttctgtatttgattggccttgatgttctgaatcttgctttgtctgagctcccttat

SEQ ID NO: 75713 - DNA, 110 bp, synthetic construct
  source 1..110: mol_type = other DNA
tctgtatttgattggccttgatgttctgaatcttgctttgtctgagctcccttatcctccttgtacctggtctcttcgagcactacctcatttccacacaggcttatgtg

SEQ ID NO: 75714 - DNA, 110 bp, synthetic construct
  source 1..110: mol_type = other DNA
ccatgaaaactatccttatgtttataagacagagaataactggatagttacctaatatttgatgctttgggatggcccctcctagtgagtgagatggaacttagtacggg

SEQ ID NO: 75715 - DNA, 110 bp, synthetic construct
  source 1..110: mol_type = other DNA
tatttgatgctttgggatggcccctcctagtgagtgagatggaacttagtacgggatcaatacagagaattaaacagggtcagatgccagaagctggtaagcaggggtaa

SEQ ID NO: 75716 - DNA, 110 bp, synthetic construct
  source 1..110: mol_type = other DNA
cctctttttacccttgtagtttgcctgttgttttaaacatgcagattttgcaatcctcttatactaaccatttaaatcttaattcttttcctcaatatcgaattccactg

SEQ ID NO: 75717 - DNA, 110 bp, synthetic construct
  source 1..110: mol_type = other DNA
agcttcctgcagccagatggagagttgggtgcttggttctccctcacctcaaataattcccgacacttccccacctagaaggtagagcccctgacctgttgaagttaccc

SEQ ID NO: 75718 - DNA, 110 bp, synthetic construct
  source 1..110: mol_type = other DNA
attcccgacacttccccacctagaaggtagagcccctgacctgttgaagttaccctaatctttttgtctggagtgtccacttggatgcctaagggcccctccagtctgta

SEQ ID NO: 75719 - DNA, 110 bp, synthetic construct
  source 1..110: mol_type = other DNA
agtcaaatgggagagcctgaaaataagggggcccaaaagaattattagctttataaactctccatacatctcagtttgactaagttatatctgtgtactaggaaccctga

SEQ ID NO: 75720 - DNA, 110 bp, synthetic construct
  source 1..110: mol_type = other DNA
aggtaaatttaggaggaagtatgtgtgacaaatggtgctgtcaattcctcttatttgaggattacttattgtttatcttgagagcatatacgtaacaggttatgtctcct

SEQ ID NO: 75721 - DNA, 110 bp, synthetic construct
  source 1..110: mol_type = other DNA
gagagcaataaaggcttgcgtttgatttcaatgccctcctttgaggtggttggcaccacaggtggtgcctgttcaggaacccctagcaggcatgggtcatgatcatctct

SEQ ID NO: 75722 - DNA, 110 bp, synthetic construct
  source 1..110: mol_type = other DNA
ttgcgtttgatttcaatgccctcctttgaggtggttggcaccacaggtggtgcctgttcaggaacccctagcaggcatgggtcatgatcatctctagcttctgtgataac

SEQ ID NO: 75723 - DNA, 110 bp, synthetic construct
  source 1..110: mol_type = other DNA
ttaggacaagggttatctcctctaggaaatcatctgtaactcccttaatccactgaattaactgtttctcctgtgcgccttcagacacctgatacttccctctatcttaa

SEQ ID NO: 75724 - DNA, 110 bp, synthetic construct
  source 1..110: mol_type = other DNA
aattaactgtttctcctgtgcgccttcagacacctgatacttccctctatcttaacacatcgcattgtattgtaactgagtcattttaaaagatgatcccacattaggat

SEQ ID NO: 75725 - DNA, 110 bp, synthetic construct
  source 1..110: mol_type = other DNA
tttctggaaatacagagaggtaccagtttacaggttaccagccacaggtgaaggtggtaaaagggttcagactgagcagaggaacccttctcctctttcctctgttcagc

SEQ ID NO: 75726 - DNA, 110 bp, synthetic construct
  source 1..110: mol_type = other DNA
ggtaaaagggttcagactgagcagaggaacccttctcctctttcctctgttcagctccagaaagaagatagaaggaaagaatgcaaagaaaattccaaaactggtgatga

SEQ ID NO: 75727 - DNA, 110 bp, synthetic construct
  source 1..110: mol_type = other DNA
aaggggcaaccggggctctgttcagacgcttgtcacggaaaaggaagcgaatctcgagggaaattgtgccctaagccggttatgttgccaggagaggtcgggaaaaccgt

SEQ ID NO: 75728 - DNA, 110 bp, synthetic construct
  source 1..110: mol_type = other DNA
gagggaaattgtgccctaagccggttatgttgccaggagaggtcgggaaaaccgtccccgccctgatcttggcccgcccagagcgtgaccacgcctctggccacgcccat

SEQ ID NO: 75729 - DNA, 110 bp, synthetic construct; identical to SEQ ID NO: 75727
  source 1..110: mol_type = other DNA

SEQ ID NO: 75730 - DNA, 110 bp, synthetic construct; identical to SEQ ID NO: 75728
  source 1..110: mol_type = other DNA

SEQ ID NO: 75731 - DNA, 110 bp, synthetic construct
  source 1..110: mol_type = other DNA
attttctcttccactccaaacatctcaccgcggggccagggcctgtgtattcctctcactggagaacagggtggagggtgaaggaggagggtcttaccgagttctccttc

SEQ ID NO: 75732 - DNA, 110 bp, synthetic construct
  source 1..110: mol_type = other DNA
tacagtacagatctgcatttctgcatgccttctgatacctgcatgtgcatatggcatacactcaagctgcccagacctgtacgcagtttctccttccttctggtgtcaac

SEQ ID NO: 75733 - DNA, 110 bp, synthetic construct
  source 1..110: mol_type = other DNA
atacactcaagctgcccagacctgtacgcagtttctccttccttctggtgtcaacctctgtctcaagcgccatgcttccggtgttcctgtcttactggaccaagacatgt

SEQ ID NO: 75734 - DNA, 110 bp, synthetic construct
  source 1..110: mol_type = other DNA
tgagagtgaagagaaaggctctccagggcttagtctgcaaaatggccaaatttattgctttgcaaaataagggagtgaaaaggcagcatgatgaaagagaggaaggaggg

SEQ ID NO: 75735 - DNA, 110 bp, synthetic construct
  source 1..110: mol_type = other DNA
cagcacagcgatctccagtttggccagctcttcgttgcgcttgtcggcctgcgggtcgccgtctttcccctgcgcctcggctccccgactggtattggcatctccggcgg

SEQ ID NO: 75736 - DNA, 110 bp, synthetic construct
  source 1..110: mol_type = other DNA
agctcttcgttgcgcttgtcggcctgcgggtcgccgtctttcccctgcgcctcggctccccgactggtattggcatctccggcggccagagaccaccaccggctagagtt

SEQ ID NO: 75737 - DNA, 110 bp, synthetic construct
  source 1..110: mol_type = other DNA
ctgctagaggtagaggaattagcgtctgctttcctgagcagctcagctctcatcccaaatctgcatacctatttagcaaagcaaaagctgggcagttaatgactgaagaa

SEQ ID NO: 75738 - DNA, 110 bp, synthetic construct
  source 1..110: mol_type = other DNA
agtatgactcatcttaattaacactcattaaatccacacctttctaaatagcattttaatttaagtgaacactagagtttcattagcaattagagagggatatgtgggta

SEQ ID NO: 75739 - DNA, 110 bp, synthetic construct
  source 1..110: mol_type = other DNA
gctggcaacctttcagccagggcctctgggaccagcccctccattgagttcatttatgtatccattcaacaaaacatctctaaaatccaggctgggaagcagagttaaaa

SEQ ID NO: 75740 - DNA, 110 bp, synthetic construct
  source 1..110: mol_type = other DNA
atgtatccattcaacaaaacatctctaaaatccaggctgggaagcagagttaaaagacacttcctgcctacaaagaatccattacggtaattaacaggtacccccgctaa

SEQ ID NO: 75741 - DNA, 110 bp, synthetic construct
  source 1..110: mol_type = other DNA
aacgtgaaactcgtactagctgctaagaagacaaaaggaaacaacattcggtacacagaatgtctggagcaaagtatatattcaaaaatggtaatcctggagttccctgg

SEQ ID NO: 75742 - DNA, 110 bp, synthetic construct
  source 1..110: mol_type = other DNA
ttcctggctggagactgcatctgagccacatctgtgacctactccacagctacagcaaaaccaggtcctcaactgactgtgctgggctagggattgaaaccatgctgcca

SEQ ID NO: 75743 - DNA, 110 bp, synthetic construct
  source 1..110: mol_type = other DNA
caaaaccaggtcctcaactgactgtgctgggctagggattgaaaccatgctgccacagagacaatgtcggggaaccccaacactgttcgtttttaaaccttctgtatctt

SEQ ID NO: 75744 - DNA, 110 bp, synthetic construct
  source 1..110: mol_type = other DNA
aaccagtgccttgtaacttttataacactcttaataaaaaaaatgccatggcaacagaaagaagtggagtgattaatgctgcctgtggtggtcacttctatgtttttctg

SEQ ID NO: 75745 - DNA, 110 bp, synthetic construct; identical to SEQ ID NO: 75744
  source 1..110: mol_type = other DNA

SEQ ID NO: 75746 - DNA, 110 bp, synthetic construct; identical to SEQ ID NO: 75744
  source 1..110: mol_type = other DNA

SEQ ID NO: 75747 - DNA, 110 bp, synthetic construct; identical to SEQ ID NO: 75744
  source 1..110: mol_type = other DNA

SEQ ID NO: 75748 - DNA, 110 bp, synthetic construct
  source 1..110: mol_type = other DNA
atatctaaagctgtgaatctcagattgacaaatgacagagtccctagaaacatgagctgttgaacaggataaaagtttttaaaaaacttctgggagatgtattgaaaagc

SEQ ID NO: 75749 - DNA, 110 bp, synthetic construct
  source 1..110: mol_type = other DNA
gctgttgaacaggataaaagtttttaaaaaacttctgggagatgtattgaaaagcttccttttttttttttttttttttttttcggtttttagggctgtacctgtgacac

SEQ ID NO: 75750 - DNA, 110 bp, synthetic construct
  source 1..110: mol_type = other DNA
gagtgacccaagctatggcagtgacaacactagaccttaatccgcttagccactaggggactccaagaaagttcaatttcaccaggaatcaaaaaagtctaattaaaaca

SEQ ID NO: 75751 - DNA, 110 bp, synthetic construct
  source 1..110: mol_type = other DNA
aacagctgatttcattaacttgcactggtatttaaattgtttggagcatcttacactgtaaaactcctctcaatacatgatacagtaagaaatgagagagaagcccttct

SEQ ID NO: 75752 - DNA, 110 bp, synthetic construct
  source 1..110: mol_type = other DNA
ccatttagtctgcgctagtttagatcctgaccttcttggatgattgctgacctggctgccttcccctctcttgttcccattctgctaacacattgttactacgtttaccc

SEQ ID NO: 75753 - DNA, 110 bp, synthetic construct
  source 1..110: mol_type = other DNA
tttcagtgatgcatctgctagtattcttaaatcttatgtgatttttctctactctgatacactgtactcttggtaatggctagtcagctccaccaatgttccagagttgc

SEQ ID NO: 75754 - DNA, 110 bp, synthetic construct
  source 1..110: mol_type = other DNA
gatacactgtactcttggtaatggctagtcagctccaccaatgttccagagttgctgaagggtgctatagaaagtcatgacaaattcacatttttctctatggggccttg

SEQ ID NO: 75755 - DNA, 110 bp, synthetic construct
  source 1..110: mol_type = other DNA
attaatgaaagagacagaatatatctcagggcagattccattggccataggactcttatcaagggcagacacagcccattctgtagggatcttacagaacccaagatcac

SEQ ID NO: 75756 - DNA, 110 bp, synthetic construct
  source 1..110: mol_type = other DNA
cccaaataaatagcaaaaagacaaaaaaaaaaaaaagaagggaaaagcaataaggtcctactgtacagtatacggaactatatccagtctcttgggctagaccatgatgg

SEQ ID NO: 75757 - DNA, 110 bp, synthetic construct; identical to SEQ ID NO: 75756
  source 1..110: mol_type = other DNA

SEQ ID NO: 75758 - DNA, 110 bp, synthetic construct
  source 1..110: mol_type = other DNA
atgaaggcataagtagcactggtgacagaatttcctggtgaagaaaaggatataggggccagagtctgtagtcacttaacaaatgtttagatgctaagctcttttctggg

SEQ ID NO: 75759 - DNA, 110 bp, synthetic construct
  source 1..110: mol_type = other DNA
atgcctgaaagagatattctctcatcctagctgaacttgaacctcaagaatacgaggttggaattatcacagacacttggcactgtgatgacactgagaatttaatcaac

SEQ ID NO: 75760 - DNA, 110 bp, synthetic construct
  source 1..110: mol_type = other DNA
ttttattgtggttcacagatattacattttttataaatggaaacttgtgtccagcaagtctattagcaccatttttcctataacctttgctcactttgtgtctgtgttac

SEQ ID NO: 75761 - DNA, 110 bp, synthetic construct
  source 1..110: mol_type = other DNA
aagtctattagcaccatttttcctataacctttgctcactttgtgtctgtgttacattttggtaactgtcacaacatttcaaatttttcattatggtatttgttaggtaa

SEQ ID NO: 75762 - DNA, 110 bp, synthetic construct
  source 1..110: mol_type = other DNA
tcaatcatgccatgggaacgtcagcagctcagctctgttagcgccacttaggctgggagtagaaacagggaggctcacaggattgtgtgtggtgtctcgccactcatcta

SEQ ID NO: 75763 - DNA, 110 bp, synthetic construct
  source 1..110: mol_type = other DNA
aaatcaatgccttttggaggaagtgctcctctttgaccttctccactttattcgttggacagaagttaagattgaaaggtttcagaatatagggccaggtcctttggatg

SEQ ID NO: 75764 - DNA, 110 bp, synthetic construct
  source 1..110: mol_type = other DNA
gaagaggtagctaaatatttttaaatgagggggcaatgccttcctggcaagctacgtccaggaagtcttgagagatgcttggcaagaaactcactgatcccatgaaggga

SEQ ID NO: 75765 - DNA, 110 bp, synthetic construct
  source 1..110: mol_type = other DNA
cctgtcggcttgtttgtcacatgtcaccgagcctcatgggcccaccgctgggataatagccctaatccagctacacagaaagctggaaccttcggggagctgagtgcctc

SEQ ID NO: 75766 - DNA, 110 bp, synthetic construct
  source 1..110: mol_type = other DNA
atagccctaatccagctacacagaaagctggaaccttcggggagctgagtgcctctttcttgtgttgctctaattggaactaggcatttccaccccatcagcctttacct

SEQ ID NO: 75767 - DNA, 110 bp, synthetic construct
  source 1..110: mol_type = other DNA
agtagacacgttaatgtctgagaagcactgtttttaggacatttccaaatgatcattactgcattgggttagctaattactatcatgatgtagcatttggcattctgtac

SEQ ID NO: 75768 - DNA, 110 bp, synthetic construct
  source 1..110: mol_type = other DNA
accaaatgtgccatcatgcctgccctggtgcgcatctattctgccctctcttgggtcacagtgtgtgtgatgtcctggctccgtctgaggctcacctctctataaggtta

SEQ ID NO: 75769 - DNA, 110 bp, synthetic construct
  source 1..110: mol_type = other DNA
tcacagtgtgtgtgatgtcctggctccgtctgaggctcacctctctataaggttacctattcaatgattttgactctgcaattgtcccctctcttgcatcatctatttcc

SEQ ID NO: 75770 - DNA, 110 bp, synthetic construct
  source 1..110: mol_type = other DNA
ggctattatcagttattgagtacagtttcctgtgccatatactaggtgcttatagtttacctattttacatatagtagtaggtatatgcgaagcccaaactcttaatttc

SEQ ID NO: 75771 - DNA, 110 bp, synthetic construct
  source 1..110: mol_type = other DNA
tatttgatgtcttttcaagcttctaagcctttcttttccaactcactcaaagtcaaatccaaattctttaacatgacccagattccagctgtctctgtgactttccaggt

SEQ ID NO: 75772 - DNA, 110 bp, synthetic construct
  source 1..110: mol_type = other DNA
tgtttgtacccagtcccaagcttgatctgcctcagatcaggattttatcgtgtgagccaggaactttcttccatgtttaagctatttaagggtcaaattttttgtaactt

SEQ ID NO: 75773 - DNA, 110 bp, synthetic construct
  source 1..110: mol_type = other DNA
gtgaggagcagggccagtccacacttgaccctcaagggagtaaatgctttacatggcttagaagagggcataccctcccctgggcttgggaggctcacagctctctcctc

SEQ ID NO: 75774 - DNA, 110 bp, synthetic construct
  source 1..110: mol_type = other DNA
cctttatggatctggcactagatgtcatagacaactttttcttgcaactctcagaagtatgtttttcagttgaccaaatagatgacagagcattttgatgtgttttgata

SEQ ID NO: 75775 - DNA, 110 bp, synthetic construct
  source 1..110: mol_type = other DNA
agtatgtttttcagttgaccaaatagatgacagagcattttgatgtgttttgatactttccaatggaacagctacgccttatctgaccacggtgaatatttaccatgtgt

SEQ ID NO: 75776 - DNA, 110 bp, synthetic construct
  source 1..110: mol_type = other DNA
ttgatacagcagggtaaagctcaagccatcttgcattatgagtatgatttctaaagttgccggctgggctagtagtgtttctgacttgcctgaccagggcacttacttac

SEQ ID NO: 75777 - DNA, 110 bp, synthetic construct
  source 1..110: mol_type = other DNA
gttgccggctgggctagtagtgtttctgacttgcctgaccagggcacttacttacctttgtgggccagtggcacatgttttgaatagccagcagacagttttgtggctat

SEQ ID NO: 75778 - DNA, 110 bp, synthetic construct; identical to SEQ ID NO: 75776
  source 1..110: mol_type = other DNA

SEQ ID NO: 75779 - DNA, 110 bp, synthetic construct; identical to SEQ ID NO: 75777
  source 1..110: mol_type = other DNA

SEQ ID NO: 75780 - DNA, 110 bp, synthetic construct
  source 1..110: mol_type = other DNA
ctccccatctcaaaatccttgaccacatctgccgaatcccttttggtgtgtgagttcatgtttacaggttctgctattccacatctctccaccactgtacttcccatctc

SEQ ID NO: 75781 - DNA, 110 bp, synthetic construct
  source 1..110: mol_type = other DNA
tcatgtttacaggttctgctattccacatctctccaccactgtacttcccatctccagaaagccccatcattccccttaaactcggggtccccttatgcacctctgtctt

SEQ ID NO: 75782 - DNA, 110 bp, synthetic construct
  source 1..110: mol_type = other DNA
aagaaaaagcccatgggcctttatctctactgacctgtggaccccagcatcagagcagagttatctctctggagaacagagaaaaaatgcagttaagtagggcttgactt

SEQ ID NO: 75783 - DNA, 110 bp, synthetic construct
  source 1..110: mol_type = other DNA
cctaaagattctctcccttcagaagatctcaccatttggaactcaaagcaagatgtgtcctcaccacctcagccctacactcttaagtctccatgctgctcagtttcact

SEQ ID NO: 75784 - DNA, 110 bp, synthetic construct
  source 1..110: mol_type = other DNA
tgtcctcaccacctcagccctacactcttaagtctccatgctgctcagtttcactttgtaagattcagggcctctgcgagggtgtagcacctttgcagtaattagaaaaa

SEQ ID NO: 75785 - DNA, 110 bp, synthetic construct
  source 1..110: mol_type = other DNA
ttcacttccaatgctggttataccctttggaccagaaagcaagctgagctccatgctgtgaagagctatgccatgccaaggcggttgaccactctttctttcctgttctc

SEQ ID NO: 75786 - DNA, 110 bp, synthetic construct
  source 1..110: mol_type = other DNA
ctgtgaagagctatgccatgccaaggcggttgaccactctttctttcctgttctccactgtcttgcagaccggacgatgtgctcctgcatcgcactcatgatgagatcgt

SEQ ID NO: 75787 - DNA, 110 bp, synthetic construct
  source 1..110: mol_type = other DNA
ttacaattccttctttattattacctgtagcatggccatcacgggtcttttactttttaacctctggctccaacatgaatatctagctatcaatgagtgtatttccaaag

SEQ ID NO: 75788 - DNA, 110 bp, synthetic construct
  source 1..110: mol_type = other DNA
gagccaggcccaactggaccagacctatgaacacctgggagaattcccttggggagcttcttaaccaccacaatgttcagaggcactgaaacattccctgactatgaact

SEQ ID NO: 75789 - DNA, 110 bp, synthetic construct
  source 1..110: mol_type = other DNA
aaagatgccctggccccctgctgcacccaggatcaagcccaggcttaatgagaagacccatttcacaattcctctgtcttagcgtaactctccagcttctcctcatgcca

SEQ ID NO: 75790 - DNA, 110 bp, synthetic construct
  source 1..110: mol_type = other DNA
acccatttcacaattcctctgtcttagcgtaactctccagcttctcctcatgccagtttcccaagcctcacagatgttcaccctaagctagaaccgtgctaattattgtc

SEQ ID NO: 75791 - DNA, 110 bp, synthetic construct
  source 1..110: mol_type = other DNA
gcctgaattaccttaactaacctggaaatatacagtgccttgaaccttttaaagcctttgagcattgccgtttgtcataatactagttacagcagtttgaaaaatatgtt

SEQ ID NO: 75792 - DNA, 110 bp, synthetic construct
  source 1..110: mol_type = other DNA
tgtctaaaatagtgtcttagattcatgcagtagtttattttaaagggggtcaaattatggtaaaaaaaaaaaagtaacaaaattcaaggagttccctcatggctcagcag

SEQ ID NO: 75793 - DNA, 110 bp, synthetic construct; identical to SEQ ID NO: 75792
  source 1..110: mol_type = other DNA

SEQ ID NO: 75794 - DNA, 110 bp, synthetic construct
  source 1..110: mol_type = other DNA
ccaacttcaggaccaaaacgaaacttgtaccagcttttcagagatttccccctatggccatctattttcatctacgggccacagaggaaaaaaagcaacaggggttcttg

SEQ ID NO: 75795 - DNA, 110 bp, synthetic construct
  source 1..110: mol_type = other DNA
catttctttgagttagtacttatactgtgattcccagttcacacttactgtattgtctttatacttctctttggtgttcaggtggttgttttatttatctacataattta

SEQ ID NO: 75796 - DNA, 110 bp, synthetic construct; identical to SEQ ID NO: 75795
  source 1..110: mol_type = other DNA

SEQ ID NO: 75797 - DNA, 110 bp, synthetic construct
  source 1..110: mol_type = other DNA
cccttagctcacacaagaggggcccagccatccatagtccacacaagaaatgctcaggctaccatagcccaagcaactggcttctcaccacccatagcctgcaccagagg

SEQ ID NO: 75798 - DNA, 110 bp, synthetic construct
  source 1..110: mol_type = other DNA
gcatagcacatagtaggttgttcttgaatgaatgcattcaaccctgaatgcaaaaataaatgagtgctaagaatcctgcatggaaaactttctcttagcttatgtattat

SEQ ID NO: 75799 - DNA, 110 bp, synthetic construct
  source 1..110: mol_type = other DNA
ataaatgagtgctaagaatcctgcatggaaaactttctcttagcttatgtattattgaccaggatatctttcagaacctaaactttggtaaaatgtccttccatgtgctt

SEQ ID NO: 75800 - DNA, 110 bp, synthetic construct
  source 1..110: mol_type = other DNA
atagatctccttccatggtggttgatattcaacatactcaacctaccattgctaagcaagctggtccctccatggtgtggtatcatgtgaaaagctctgggttgctcata

SEQ ID NO: 75801 - DNA, 110 bp, synthetic construct
  source 1..110: mol_type = other DNA
gcaagctggtccctccatggtgtggtatcatgtgaaaagctctgggttgctcatacctagctccaaatgagcatcaagtcataaccaaggccgattcatccttggttaag

SEQ ID NO: 75802 - DNA, 110 bp, synthetic construct; identical to SEQ ID NO: 75800
  source 1..110: mol_type = other DNA

SEQ ID NO: 75803 - DNA, 110 bp, synthetic construct; identical to SEQ ID NO: 75801
  source 1..110: mol_type = other DNA

SEQ ID NO: 75804 - DNA, 110 bp, synthetic construct
  source 1..110: mol_type = other DNA
tgcaggttgttgaatgtgtattaccttataattaggtgaaggcgtagctagagctgctgcccactgcaggttgttgaacttgtctgttctctgttaggcaaagaaaaacc

SEQ ID NO: 75805 - DNA, 110 bp, synthetic construct
  source 1..110: mol_type = other DNA
acaacactgcagtcaataacagcagcaccagacagtatattaattcctttaccgtaaaagctgtatgtaattataactttctatgtgtggtgttatcaaaagcatcactg

SEQ ID NO: 75806 - DNA, 110 bp, synthetic construct
  source 1..110: mol_type = other DNA
ccttcccaggcacatttacaaacttgttaggactttagtattccctcctcctcaagatcatgttgttcagtggctatctgcctttccttgtactaagctggtcaggtccc

SEQ ID NO: 75807 - DNA, 110 bp, synthetic construct
  source 1..110: mol_type = other DNA
gatcatgttgttcagtggctatctgcctttccttgtactaagctggtcaggtcccttcagatcactccagcctacctccacaggtaaccaactgccttatgtggagaagg

SEQ ID NO: 75808 - DNA, 110 bp, synthetic construct
  source 1..110: mol_type = other DNA
tgctgtgcagtagagagaaaatcagaaaggcaaaaaatatgatggattgtttcagtgattaaaagtctttgacactgataagtctaagtttggatggcagtgttttttta

SEQ ID NO: 75809 - DNA, 110 bp, synthetic construct
  source 1..110: mol_type = other DNA
tgattaaaagtctttgacactgataagtctaagtttggatggcagtgtttttttaattgagtcctttatacctctcctattatcatgtacaactaggcaagagatttgta

SEQ ID NO: 75810 - DNA, 110 bp, synthetic construct
  source 1..110: mol_type = other DNA
ccttgctgtcaatcattccagtttaaggcacaatagctttactgttctcctgacaacatgtgaaaccctcctggagccatttggtaaagggattttggggggaaaaattg

SEQ ID NO: 75811 - DNA, 110 bp, synthetic construct
  source 1..110: mol_type = other DNA
aggcccgagtggcctttgagagctggtcgaccccgcgggcccttggactcaagaactagtcacccgggtcagctctcgaccatgagggccttcagattcaggcccgaatc

SEQ ID NO: 75812 - DNA, 110 bp, synthetic construct
  source 1..110: mol_type = other DNA
ctagtcacccgggtcagctctcgaccatgagggccttcagattcaggcccgaatcgcctgggatagttgttcaaccccacttgccctagggcacaagcgccagtggcccg

SEQ ID NO: 75813 - DNA, 110 bp, synthetic construct
  source 1..110: mol_type = other DNA
ctcctaaaaatatctatttgaagacatgttcttccagttttcccagtgcatagagtgcttcattcctgatttccaccctgagttctgctctggtggtgctaggagtagca

SEQ ID NO: 75814 - DNA, 110 bp, synthetic construct
  source 1..110: mol_type = other DNA
tgcttcattcctgatttccaccctgagttctgctctggtggtgctaggagtagcagctgcagtggctcatgattaaattcttgtataggcagatgacaaataatgacaag

SEQ ID NO: 75815 - DNA, 110 bp, synthetic construct
  source 1..110: mol_type = other DNA
tccagatcctttccaaacctttctctatgcagtaacaagaatgtttattttaatatggatcttatcacagtatacatacacactatccaactgacatgtactcacagctg

SEQ ID NO: 75816 - DNA, 110 bp, synthetic construct
  source 1..110: mol_type = other DNA
tggatcttatcacagtatacatacacactatccaactgacatgtactcacagctgcttaaaacctttcgataccttcccattattctttattacattctaaaaccttcgc

SEQ ID NO: 75817 - DNA, 110 bp, synthetic construct
  source 1..110: mol_type = other DNA
atgagataaaaattcctgggatatcccttttgctggtctgggaacatcccagcactccttagtagatgttttggtccccaacgctccaaagctgggggccggcagcaacg

SEQ ID NO: 75818 - DNA, 110 bp, synthetic construct
  source 1..110: mol_type = other DNA
tccttagtagatgttttggtccccaacgctccaaagctgggggccggcagcaacggtcagaaatcaaatttcaattgtgttaatacatagtttttattccttgggagttt

SEQ ID NO: 75819 - DNA, 110 bp, synthetic construct
  source 1..110: mol_type = other DNA
ctaggccatgagggaactcccatcctccagactctggagtgtacgcttggctgatttctaatggtctaaggattttctcttgtagcttgcatttaacatcctcccctgca

SEQ ID NO: 75820 - DNA, 110 bp, synthetic construct
  source 1..110: mol_type = other DNA
ttctaatggtctaaggattttctcttgtagcttgcatttaacatcctcccctgcagtccatgaccaagtactgaaggcaacagaagtataaataccccaggtccctcacc

SEQ ID NO: 75821 - DNA, 110 bp, synthetic construct; identical to SEQ ID NO: 75819
  source 1..110: mol_type = other DNA

SEQ ID NO: 75822 - DNA, 110 bp, synthetic construct; identical to SEQ ID NO: 75820
  source 1..110: mol_type = other DNA

SEQ ID NO: 75823 - DNA, 110 bp, synthetic construct
  source 1..110: mol_type = other DNA
aacaaaaaacctaagtgtgaatatttttagtatctaagatagagttttggtaggaggatggcatttcagattcttacagtacatcttctataccaattacagtctggtgt

SEQ ID NO: 75824 - DNA, 110 bp, synthetic construct
  source 1..110: mol_type = other DNA
cggcacggctcattaaaagagtccgggtcagacctgttacactgaggtgttggttcaaggggaaatttcctttgacccagaatcgcttccatcctgagctgattactcct

SEQ ID NO: 75825 - DNA, 110 bp, synthetic construct
  source 1..110: mol_type = other DNA
tgatatttatcatttctttctttcattatacagttcatgtttccttctccatcgctcaggagctcagctggtcaggttctttacctataagtctgactcctcattggttc

SEQ ID NO: 75826 - DNA, 110 bp, synthetic construct
  source 1..110: mol_type = other DNA
catttgaatccatgtctttttcgaccaatgtccatgtttcctgcagtgtgatggttagcagatattggagcaggttgggaacctacagctctaggtatatagagtaggag

SEQ ID NO: 75827 - DNA, 110 bp, synthetic construct
  source 1..110: mol_type = other DNA
tcattgagatttcatgaatggagtgcctgggaaggaagtaggtgaagctgtgggattaggtgtgaggaacacaggaaccagctagtcaaatcaaaacccattgtgtcagg

SEQ ID NO: 75828 - DNA, 110 bp, synthetic construct
  source 1..110: mol_type = other DNA
ttaggtgtgaggaacacaggaaccagctagtcaaatcaaaacccattgtgtcaggacagcagatggaatgtgggctctagaatctggaattcctgggtttttgtctttgc

SEQ ID NO: 75829 - DNA, 110 bp, synthetic construct
  source 1..110: mol_type = other DNA
aacatttctattactgcttaaagttttctcctgcccctttgtagtaaattcccttccctcattccaggtacctggcaatcactgatatgttttccatcactctagatttg

SEQ ID NO: 75830 - DNA, 110 bp, synthetic construct
  source 1..110: mol_type = other DNA
ccctcattccaggtacctggcaatcactgatatgttttccatcactctagatttgctgtttcaacacttcttataagtggaatcatactgtatgtagtgttttatgtctg

SEQ ID NO: 75831 - DNA, 110 bp, synthetic construct
  source 1..110: mol_type = other DNA
ttttctacacctatcattttctcttaaactttctaatctccctttaaaagtccattttattttgctacctttacgatattccatatttcttacaccgttttgagtacagc

SEQ ID NO: 75832 - DNA, 110 bp, synthetic construct; identical to SEQ ID NO: 75831
  source 1..110: mol_type = other DNA

SEQ ID NO: 75833 - DNA, 110 bp, synthetic construct; identical to SEQ ID NO: 75831
  source 1..110: mol_type = other DNA

SEQ ID NO: 75834 - DNA, 110 bp, synthetic construct; identical to SEQ ID NO: 75831
  source 1..110: mol_type = other DNA

SEQ ID NO: 75835 - DNA, 110 bp, synthetic construct
  source 1..110: mol_type = other DNA
aattatgtatttgcataactggtttccagataacacatcagtaaccatgatagtgaatactttacagagagctcactgtgtaccaggctctcaatattaactcatttact

SEQ ID NO: 75836 - DNA, 110 bp, synthetic construct
  source 1..110: mol_type = other DNA
accctgcacatagtacatgcttgcaaatttcagccactgctcttgctgtcatacacttcctttgttttaaaaatctgcacagctcctaatgaccacagaattaagtccaa

SEQ ID NO: 75837 - DNA, 110 bp, synthetic construct
  source 1..110: mol_type = other DNA
tcccctcaaggttcttgagtttggtgacaagatggcttctccatgtagaaaacagcacccatggtccagagagaaaaagtaccaacagcgacaggcctcacaggggtgct

SEQ ID NO: 75838 - DNA, 110 bp, synthetic construct
  source 1..110: mol_type = other DNA
cacccatggtccagagagaaaaagtaccaacagcgacaggcctcacaggggtgctgtcagaagccaccgcttaaaagaacacgtggtcgagcccctccagctactgtgca

SEQ ID NO: 75839 - DNA, 110 bp, synthetic construct
  source 1..110: mol_type = other DNA
cactcataactagggcctccccattgcccttgctgtcttctagggaaggagtgatttagagcagaaagagtaatgtaatgacagggagcgtttaattgtgtggaacatag

SEQ ID NO: 75840 - DNA, 110 bp, synthetic construct
  source 1..110: mol_type = other DNA
ttagagcagaaagagtaatgtaatgacagggagcgtttaattgtgtggaacatagaaaacagcatgcctttcacctcttacctaactaaatgttattagtgataatgtcc

SEQ ID NO: 75841 - DNA, 110 bp, synthetic construct
  source 1..110: mol_type = other DNA
gaactaattgattctggatcaggagaggaaaaaatgtcttctctcttttacacgtagactttcagcactgtagtaaggtgctgtctactctgtctctgtagggctgtgtt

SEQ ID NO: 75842 - DNA, 110 bp, synthetic construct
  source 1..110: mol_type = other DNA
agactttcagcactgtagtaaggtgctgtctactctgtctctgtagggctgtgttttccagttcctaccattgttcctcaaacaacatgttttctgtattatgcctgctt

SEQ ID NO: 75843 - DNA, 110 bp, synthetic construct
  source 1..110: mol_type = other DNA
tacctcctctccctgctccagttttgctcttttatattctgctttcttcactttccttctcctctttattcctgtctttctgcagacagtctagaacattgttcagtact

SEQ ID NO: 75844 - DNA, 110 bp, synthetic construct
  source 1..110: mol_type = other DNA
caatgattgtgaataaagggacgtgtactatacatacatagaggcctatcagtaacgaattctgtaccaaataatactattctgtaagtctcttaagggctgagcttgtc

SEQ ID NO: 75845 - DNA, 110 bp, synthetic construct
  source 1..110: mol_type = other DNA
catgacaggaactctggcagttgtttttttaaataaatgagggattgttaccattggggactgacaatgtaccaaagctcagtaaagtttcacttttaaaagttggagtc

SEQ ID NO: 75846 - DNA, 110 bp, synthetic construct
  source 1..110: mol_type = other DNA
agcattttagttttgtcttcatggagtgggcagtcatcgccattagaacccaaaccaaagctgtgatgatggtgccattcctgcctcatatgaggaatatcaggagcatg

SEQ ID NO: 75847 - DNA, 110 bp, synthetic construct
  source 1..110: mol_type = other DNA
cccacattttaggcactttgggcatccggtctctcttccaaaaagttgaagttgtattggaagacctctatagcttctttcagtttttagattcagtgacgtcaaaatat

SEQ ID NO: 75848 - DNA, 110 bp, synthetic construct
  source 1..110: mol_type = other DNA
tttagacttttctgccttgtgcttgttaactgtgaccgtgcacatgatgaaattctctggaggccaaagatgtctaagctccttagatgcaaagtattgtagcaaagaaa

SEQ ID NO: 75849 - DNA, 110 bp, synthetic construct
  source 1..110: mol_type = other DNA
tctggaggccaaagatgtctaagctccttagatgcaaagtattgtagcaaagaaaagtgatattctgaccagttctttcagccacattgcaaatgtaccacacaggaagg

SEQ ID NO: 75850 - DNA, 110 bp, synthetic construct
  source 1..110: mol_type = other DNA
gaagagagactcagtaagtcacagcaggctgtctttttgcccaagacctaagccttcaaatactgcaaacaaaaagtctttccctaagagggtcaccagctttacaggac

SEQ ID NO: 75851 - DNA, 110 bp, synthetic construct
  source 1..110: mol_type = other DNA
tcaaatactgcaaacaaaaagtctttccctaagagggtcaccagctttacaggacatattctcaacaagggatcacagatgatgtgcagtcttcctccccaaataaactc

SEQ ID NO: 75852 - DNA, 110 bp, synthetic construct
  source 1..110: mol_type = other DNA
tggacatatttgaaaatgtagcattttccttatatatatttgagtcacagggaaataattggttgtcagtgtttctttccagatcagtcattcgtttatcaatttctttc

SEQ ID NO: 75853 - DNA, 110 bp, synthetic construct; identical to SEQ ID NO: 75852
  source 1..110: mol_type = other DNA

SEQ ID NO: 75854 - DNA, 110 bp, synthetic construct
  source 1..110: mol_type = other DNA
ttcctggaatactattatttgacttaatcttagagcttttcaggtcaagatctcaaataatcattcctcactacacaggactggaactggtctctgaatatatctctgag

SEQ ID NO: 75855 - DNA, 110 bp, synthetic construct
  source 1..110: mol_type = other DNA
aataatcattcctcactacacaggactggaactggtctctgaatatatctctgaggaacccacagtgcttaaatagccctaatcaaagaggagcttccattcatctatat

SEQ ID NO: 75856 - DNA, 110 bp, synthetic construct
  source 1..110: mol_type = other DNA
gtattcaacttgccctctgctattctaggattccatcattctagttggaataaagggaccctttttatattttaaaaatttttttaaattttttattttgggcggagggg

SEQ ID NO: 75857 - DNA, 110 bp, synthetic construct
  source 1..110: mol_type = other DNA
agttatctgtttatgtgaggagtagcatgcctaaacaagaatggcagtactaattggcagctgatttgaggaccattctaccaaattagttaaaataaaataataatata

SEQ ID NO: 75858 - DNA, 110 bp, synthetic construct
  source 1..110: mol_type = other DNA
tgcacacaactgctcctgtcttaggtatagaaggctttgcctggagggaagaaaatgatttcagaagatctgatgttacccttgctcactcagtttctcttctacaagga

SEQ ID NO: 75859 - DNA, 110 bp, synthetic construct
  source 1..110: mol_type = other DNA
tgatttcagaagatctgatgttacccttgctcactcagtttctcttctacaaggagggtatccaaaagctcatatctttgtaattggagatcattgccattctctctgct

SEQ ID NO: 75860 - DNA, 110 bp, synthetic construct
  source 1..110: mol_type = other DNA
cactcagcattctttctaggtctagatccaaaaaaagacaacatacaaacaccaaagtgatgtgtggaaaagaggacatcacgcacccattctgtagccaaatattgttc

SEQ ID NO: 75861 - DNA, 110 bp, synthetic construct
  source 1..110: mol_type = other DNA
agtgatgtgtggaaaagaggacatcacgcacccattctgtagccaaatattgttctggatcgggctagtggttgtgagagggtgtgcatgcatgtgtgtgtgtttactat

SEQ ID NO: 75862 - DNA, 110 bp, synthetic construct; identical to SEQ ID NO: 75860
  source 1..110: mol_type = other DNA

SEQ ID NO: 75863 - DNA, 110 bp, synthetic construct; identical to SEQ ID NO: 75861
  source 1..110: mol_type = other DNA

SEQ ID NO: 75864 - DNA, 110 bp, synthetic construct
  source 1..110: mol_type = other DNA
ggtgattgctaataacttgccctgaattttataaacatactcatttagtcacaaccaatcaagtacagtcctgacccctgctggggtaggaagcttagagcctggtgcag

SEQ ID NO: 75865 - DNA, 110 bp, synthetic construct
  source 1..110: mol_type = other DNA
tggtgaattgaggagttgcttctttttatgtgactttgcctggcatgaagggataacagcaacactgagtcagcttttctaggtcagacatgatataacatgtttgcgtc

SEQ ID NO: 75866 - DNA, 110 bp, synthetic construct
  source 1..110: mol_type = other DNA
acagcaacactgagtcagcttttctaggtcagacatgatataacatgtttgcgtccccttcttccaaatatggttcctgatttaaaattacagaagtcactctttcccat

SEQ ID NO: 75867 - DNA, 110 bp, synthetic construct; identical to SEQ ID NO: 75865
  source 1..110: mol_type = other DNA

SEQ ID NO: 75868 - DNA, 110 bp, synthetic construct; identical to SEQ ID NO: 75866
  source 1..110: mol_type = other DNA

SEQ ID NO: 75869 - DNA, 110 bp, synthetic construct
  source 1..110: mol_type = other DNA
tactactctgtggaaaaagttcactctgaaaatggtttatgggctccttcattttctggctgggcatccttttttaagttcaccacttttcttaaaatcatacttttctt

SEQ ID NO: 75870 - DNA, 110 bp, synthetic construct
  source 1..110: mol_type = other DNA
ctggctgggcatccttttttaagttcaccacttttcttaaaatcatacttttcttcacttaccatagacacccacattttagccaagataaatttataccagctcctcgt

SEQ ID NO: 75871 - DNA, 110 bp, synthetic construct
  source 1..110: mol_type = other DNA
tgccagcaaagtttgttttgcacggatacagttgacatcagaacgatcagaaatgccagcttatgatcattaaatgtgaatctactcttagctatttcttgcaagttatc

SEQ ID NO: 75872 - DNA, 110 bp, synthetic construct
  source 1..110: mol_type = other DNA
ccagcttatgatcattaaatgtgaatctactcttagctatttcttgcaagttatctttagaggtttaccactccatgtgatatccagttcttggctgatggcttttacta

SEQ ID NO: 75873 - DNA, 110 bp, synthetic construct; identical to SEQ ID NO: 75871
  source 1..110: mol_type = other DNA

SEQ ID NO: 75874 - DNA, 110 bp, synthetic construct; identical to SEQ ID NO: 75872
  source 1..110: mol_type = other DNA

SEQ ID NO: 75875 - DNA, 110 bp, synthetic construct
  source 1..110: mol_type = other DNA
ctattagaacatggatcctactacagcatgcttggctgtagtagagccttcacaagttctgtgtgaatagctggggtggaactatatagtagacctagctatagacccac

SEQ ID NO: 75876 - DNA, 110 bp, synthetic construct
  source 1..110: mol_type = other DNA
ggggatgggagaggggctggaaattgagttcaaccatatggccgatgatttactcaatcatcatgcctatataatgaaactcaactaaaaatgctggacactgaggctaa

SEQ ID NO: 75877 - DNA, 110 bp, synthetic construct
  source 1..110: mol_type = other DNA
aatcatcatgcctatataatgaaactcaactaaaaatgctggacactgaggctaagtggagcttcctggttggtgaatgcatggatgaactgggagagtaatgtgtagga

SEQ ID NO: 75878 - DNA, 110 bp, synthetic construct
  source 1..110: mol_type = other DNA
cagcagtagtacatcccttctggactacagctgctggtgagaagcctgtcctctaggatactagctttcattggactccaataacattctttttcccccagagcctctta

SEQ ID NO: 75879 - DNA, 110 bp, synthetic construct
  source 1..110: mol_type = other DNA
actcctgactcaggtagcctccaatctcgcagataaaaaggagcttggaagagcgcaagagtgaagcaaagcgagattttatagaccaaagcgagaaggaacaaggaagt

SEQ ID NO: 75880 - DNA, 110 bp, synthetic construct
  source 1..110: mol_type = other DNA
ctgagggaagtaatgatggaacttgaggaatggggagctggttgggccatgcaagcaggcagcagacaccctgctctcagctggcatcatctctcctctcctggggccat

SEQ ID NO: 75881 - DNA, 110 bp, synthetic construct
  source 1..110: mol_type = other DNA
gctgaggagcatcttcccacggcaaactctgtgggataggaaagtttctgtgcctctttaatggcccgggaccctatggcttccctagagacatacacatctcctcatga

SEQ ID NO: 75882 - DNA, 110 bp, synthetic construct
  source 1..110: mol_type = other DNA
ataagaaccttgttatctcacccctggtttttcaagcattcagcactcactcttactactattcttcagctgcacactctatctgtgactgagatgtctagagtgatctg

SEQ ID NO: 75883 - DNA, 110 bp, synthetic construct
  source 1..110: mol_type = other DNA
ctactattcttcagctgcacactctatctgtgactgagatgtctagagtgatctgtgtttctaaagtttctgttttacctccttctttcttcaaatttgaattgttcttt

SEQ ID NO: 75884 - DNA, 110 bp, synthetic construct
  source 1..110: mol_type = other DNA
aagttcctgggccaggcactgaatcggagcagctaagacctaatctgttgatcctgcagcaactcggggtcatttaacccactgttcgcagatggggatgaagcctgtgc

SEQ ID NO: 75885 - DNA, 110 bp, synthetic construct
  source 1..110: mol_type = other DNA
tcagatttagaaattaaggaatttgagctacgagtgatatacctccacttgtaagctatgtgtctgactagcacagggaatgtgtggcagatgggagcagagttcctccc

SEQ ID NO: 75886 - DNA, 110 bp, synthetic construct
  source 1..110: mol_type = other DNA
acttgaaatgccaaaagcttaacttcagggctgctcccccaaaatataaaaaattaccaaactgaaactcatcatcttcgccccaaaacagccttcttttcccagatgtt

SEQ ID NO: 75887 - DNA, 110 bp, synthetic construct
  source 1..110: mol_type = other DNA
aaatgcagtatgatcatgtgtatcgccaatgtttatgtgcacaattatcccaacaccctagtcttatagacctccttaattgaagcaagtctctatccattcttttagcc

SEQ ID NO: 75888 - DNA, 110 bp, synthetic construct
  source 1..110: mol_type = other DNA
ccctagtcttatagacctccttaattgaagcaagtctctatccattcttttagccattcacaccccaaagtacatcactttgaattggtctgcttctgaaaaaaacaaca

SEQ ID NO: 75889 - DNA, 110 bp, synthetic construct
  source 1..110: mol_type = other DNA
aacattttcccagctttactgaaatataattgacaagctgcataagtgtaaggggcataatgtgatgaattaattgatacaagtctatattgcaacatgtttaccacgat

SEQ ID NO: 75890 - DNA, 110 bp, synthetic construct
  source 1..110: mol_type = other DNA
ctatgaagtcatagtggctatgaattagaagaatcaatccaatctttatgtcctgaagtactctcattcattttgaatgctgcaccttattttaggggaaaggggttttg

SEQ ID NO: 75891 - DNA, 110 bp, synthetic construct
  source 1..110: mol_type = other DNA
ggaatgtaggacaaggttaccagtagaaggtgtgtgtgtgtgtctgtgtgtgtgtgtgtgtgtgtgtgtgtgcacgcgtgtgagcaatttccaggttcctttagtagtca

SEQ ID NO: 75892 - DNA, 110 bp, synthetic construct
  source 1..110: mol_type = other DNA
gtgtgtgtgtgtgtgtgcacgcgtgtgagcaatttccaggttcctttagtagtcatggaaaaatgcacagcaatcaagtctgtcacattccaaatacgtaatatttctta

SEQ ID NO: 75893 - DNA, 110 bp, synthetic construct
  source 1..110: mol_type = other DNA
gcaagcttcatattaagcttggcaacatcagcttcctgcctccaattatgcgatctgttgagcctagctttggcctggtttccagtgttgaattctgcctgctggtattt

SEQ ID NO: 75894 - DNA, 110 bp, synthetic construct
  source 1..110: mol_type = other DNA
tgttgagcctagctttggcctggtttccagtgttgaattctgcctgctggtatttgtctgcattgcatggccttgtgggcagctgcttcccttcatactgtccctgtcgg

SEQ ID NO: 75895 - DNA, 110 bp, synthetic construct
  source 1..110: mol_type = other DNA
attaattacgagaatgcagtaacctaagaaggagaatgcgacgtcaaggttgacagttttaggataagagatcgttagattcactggaataaagaacatttattctatac

SEQ ID NO: 75896 - DNA, 110 bp, synthetic construct
  source 1..110: mol_type = other DNA
ccctgtgccattccctgtgattctgcctataggttcttcctggatttgagaacatcttttttgctcactcaagctggtacacatatgcagccatgctcaggatatataaa

SEQ ID NO: 75897 - DNA, 110 bp, synthetic construct
  source 1..110: mol_type = other DNA
gaatgttgaaacaccccatccttgctttctgtcaaaaaacttaggtcaaaatacggcattcctttcatttgcaaactgttgttacacacatataaagtaaacaattcata

SEQ ID NO: 75898 - DNA, 110 bp, synthetic construct
  source 1..110: mol_type = other DNA
atagcacagttaatcacttttgtcaaagaagtgggaaaaaccacaacaggcaattatacccagctaggactgtgtaaaatgtgagatccgtgtcgccagtatctcaattg

SEQ ID NO: 75899 - DNA, 110 bp, synthetic construct
  source 1..110: mol_type = other DNA
atacccagctaggactgtgtaaaatgtgagatccgtgtcgccagtatctcaattgaggggagaggaattggggctaatttttcacattgctttggatcatagaggtcata

SEQ ID NO: 75900 - DNA, 110 bp, synthetic construct; identical to SEQ ID NO: 75898
  source 1..110: mol_type = other DNA

SEQ ID NO: 75901 - DNA, 110 bp, synthetic construct; identical to SEQ ID NO: 75899
  source 1..110: mol_type = other DNA

SEQ ID NO: 75902 - DNA, 110 bp, synthetic construct
  source 1..110: mol_type = other DNA
aatattatctctgaagccgggtctccaaccaccactgcatctttgaaaccacgattggtttgaacctttgtcaccgtctctcgtggccccttggcaagtaaccctctgca

SEQ ID NO: 75903 - DNA, 110 bp, synthetic construct
  source 1..110: mol_type = other DNA
tggtttgaacctttgtcaccgtctctcgtggccccttggcaagtaaccctctgcatgccttcctcagaggttattgtcaagaggatcacaaatgcccagctccatctcct

SEQ ID NO: 75904 - DNA, 110 bp, synthetic construct
  source 1..110: mol_type = other DNA
tcagggaattaaaaagctgctcagctgagattgaggacattgtgggttctgagcaaccattaagtaacaaccaaaacacattaggcaataatgactgttcatgaaacctt

SEQ ID NO: 75905 - DNA, 110 bp, synthetic construct
  source 1..110: mol_type = other DNA
ccccgcacaattcagggagactcggcatttcttcttgggtccttgtcctgcgtttctttcccccttgtcattctttaattttgccattaaacaaacacaatgaagctgtg

SEQ ID NO: 75906 - DNA, 110 bp, synthetic construct
  source 1..110: mol_type = other DNA
ctttcccccttgtcattctttaattttgccattaaacaaacacaatgaagctgtgaggaaaccagtgctggctgaactgatgtacaggctgcagaaccaagctaaaatgc

SEQ ID NO: 75907 - DNA, 110 bp, synthetic construct
  source 1..110: mol_type = other DNA
attttaatgcctgaaatgtttattactaatttcaagaaaaaagtattgtcttggaagaagagtgagattagcagatcttccacatgcctgaacagctcctgtctctaata

SEQ ID NO: 75908 - DNA, 110 bp, synthetic construct
  source 1..110: mol_type = other DNA
attgttatgaagacaggaagcagttatttgcttcagcagtggaggtttgtgggattccttttctcaccttccttcctaaagcctcccgtttgtattttaggtcgacattg

SEQ ID NO: 75909 - DNA, 110 bp, synthetic construct
  source 1..110: mol_type = other DNA
tccttttctcaccttccttcctaaagcctcccgtttgtattttaggtcgacattgactgcagtcagaaggttgtggtttacgatcaaagctcccaagatgttggctgtct

SEQ ID NO: 75910 - DNA, 110 bp, synthetic construct
  source 1..110: mol_type = other DNA
cttggagtcttgggcaggaactgagtcgctaattttgtcaaagatattaaagatccaccccccatgcataaaagaagaggtgttttttggagcatgtctacctactgtag

SEQ ID NO: 75911 - DNA, 110 bp, synthetic construct
  source 1..110: mol_type = other DNA
caccccccatgcataaaagaagaggtgttttttggagcatgtctacctactgtagggatcggagtaagatgaccagccttttcctgctgatttatgtggatttgaaaaag

SEQ ID NO: 75912 - DNA, 110 bp, synthetic construct
  source 1..110: mol_type = other DNA
attaaccaaataatcaactataattgtaatgctataaggtactctgagagcttacaagggactgtatagtctagtttgggccttaagggaagacctcttttagaggaaac

SEQ ID NO: 75913 - DNA, 110 bp, synthetic construct
  source 1..110: mol_type = other DNA
tttcccaatttcttccagaatatctactaacccttgtccctcccttcccagtccaggtagcttagttgaattcatttgagcagatgttcccagctcaccttttactttgc

SEQ ID NO: 75914 - DNA, 110 bp, synthetic construct
  source 1..110: mol_type = other DNA
tgtttatggtttgtatcatgaaaccctagtgtgagattgctggagtagggatcctatcttagagctttgaaaccatggcctgcatagtgtcccaatcacatgaaatactc

SEQ ID NO: 75915 - DNA, 110 bp, synthetic construct
  source 1..110: mol_type = other DNA
gtgggaaggacttcacatgtaaaactattaaagtgtaagtcatgatgtggtttagggccaggggaagccaagaaatgctggacgaagataactgagtgtgtttgagcagc

SEQ ID NO: 75916 - DNA, 110 bp, synthetic construct
  source 1..110: mol_type = other DNA
ggccaggggaagccaagaaatgctggacgaagataactgagtgtgtttgagcagctgaagaaggccttgtaaagggcagtagacttgagatagacctgggcatgtatgtg

SEQ ID NO: 75917 - DNA, 110 bp, synthetic construct
  source 1..110: mol_type = other DNA
tttgaaggccctggtggttgcctttccgtgctgaatcaactctgctttgccaggctgcttgagcagatgctgatttcagcaacgaggggcagacggaccatgaacacagg

SEQ ID NO: 75918 - DNA, 110 bp, synthetic construct
  source 1..110: mol_type = other DNA
tgcttgagcagatgctgatttcagcaacgaggggcagacggaccatgaacacaggcaggatgaaatcacttggagggtgttgtagacgcttcgtgaaatgaaaaacataa

SEQ ID NO: 75919 - DNA, 110 bp, synthetic construct
  source 1..110: mol_type = other DNA
aagtggagacggaccttcccagcctcctcgggagctgaggtttgagtggttcgtgttatcagccccctgcagtgtcctaaccaacaggaagtttccccagagtttccatc

SEQ ID NO: 75920 - DNA, 110 bp, synthetic construct
  source 1..110: mol_type = other DNA
acaggatgtggaaaaaggtcgggggtagctggacaaagagccaagaggtgagtgtacaaaataaagccatgagcggggcccagagcctgcccggccttgagagaggctgc

SEQ ID NO: 75921 - DNA, 110 bp, synthetic construct
  source 1..110: mol_type = other DNA
tgacagaaagagatgtggtagggggccctcaccagaatcttatatgtgaattacactgcagacctttaagatttggcaacaaagctatgccatcatctaaagataaacac

SEQ ID NO: 75922 - DNA, 110 bp, synthetic construct
  source 1..110: mol_type = other DNA
gagaaaagttctcaccaatatagtacaagtgggagtaaggcatgtcacttctgggccagactcttttaagatgtgggtgacttgtctgtactctttttaccttccacagc

SEQ ID NO: 75923 - DNA, 110 bp, synthetic construct
  source 1..110: mol_type = other DNA
gctggatccttcacccactgcaccacaagagaactcctcatgtattacgttttgaatagaactttgcttaatttgatagcagagggatcttttttcagctttggttgttt

SEQ ID NO: 75924 - DNA, 110 bp, synthetic construct
  source 1..110: mol_type = other DNA
atagaactttgcttaatttgatagcagagggatcttttttcagctttggttgtttcttattatttttcgctgtgagaaccgaatcagcttatctgacctagtaatcatgg

SEQ ID NO: 75925 - DNA, 110 bp, synthetic construct
  source 1..110: mol_type = other DNA
atcaatggaaggacatcctgtaggaagtaggaaagcttcctattgtcaagacaacagcactgcccaaggggatgggtagagtccatgcaatctcaggtggcttctttttc

SEQ ID NO: 75926 - DNA, 110 bp, synthetic construct
  source 1..110: mol_type = other DNA
tggccttgtgcttctgtccctggagaaagttccaccagatccttgcccctttagcacatgacctaaaatcagtcagtgacacaggtgctttccaagctcctgtgtctgtg

SEQ ID NO: 75927 - DNA, 110 bp, synthetic construct
  source 1..110: mol_type = other DNA
agatgagcgatcagctatcaacatcagaacccatgatctcccaaccagatacacaaatggggagtgaatttgtatcagcttcagagaggaggtcatgccttttgcctgga

SEQ ID NO: 75928 - DNA, 110 bp, synthetic construct
  source 1..110: mol_type = other DNA
gattcatgttctacactagatcctatagcctcttacctaattgataacattaccctagtaattctcctctctctctctcctacatcctgtcttttcatgctcaactggaa

SEQ ID NO: 75929 - DNA, 110 bp, synthetic construct
  source 1..110: mol_type = other DNA
attctgagtttcagtgaatatgctcctgtacgtctgtactgatattcatctggaactatgagaaggaatggctgattataaccttgggatgtgaatatttcgaggacccc

SEQ ID NO: 75930 - DNA, 110 bp, synthetic construct
  source 1..110: mol_type = other DNA
aaatatcccgagtgggaaaaggctgagggaatcaggctggagaaaagccgagatagagaatcccggccagctactttccttgttatcactgtttgccctgcaaagacagt

SEQ ID NO: 75931 - DNA, 110 bp, synthetic construct
  source 1..110: mol_type = other DNA
tccagtttcataaagttggcattaggatgccttttacaaagagggtttattcttggtcccttaagcagagcagtgttgagggtttgattgtaagatagcaggtaattgtc

SEQ ID NO: 75932 - DNA, 110 bp, synthetic construct
  source 1..110: mol_type = other DNA
gtcccttaagcagagcagtgttgagggtttgattgtaagatagcaggtaattgtcagaaaaatggaggggatgctgtgaggaattcttgccttctgagcacttctcacag

SEQ ID NO: 75933 - DNA, 110 bp, synthetic construct
  source 1..110: mol_type = other DNA
tggacttcgggcaccttcgaaacaaggtatcaattaaaatttccttcccaggccgttcaaagctaaactcagggcacttttagagcctcctgctgatggtcctacgttca

SEQ ID NO: 75934 - DNA, 110 bp, synthetic construct
  source 1..110: mol_type = other DNA
ttaatgtctgatggatccattgggagtctagtcacagtcagaagctcttccttatctttgggttccactggaagctgatcctttagactctcaaattgctacaacgcagc

SEQ ID NO: 75935 - DNA, 110 bp, synthetic construct
  source 1..110: mol_type = other DNA
tgttttgttgttgatgtaataggaaataaaaataaggccgatttctatgttctatgtgtgtgtgcaccccgacaaataacttcatgtttcatgtgaaaatggaaactttt

SEQ ID NO: 75936 - DNA, 110 bp, synthetic construct
  source 1..110: mol_type = other DNA
caggttaaggatctggcatagtcattacagcagcttgggacactgttgtggcacagatttcttccctggccctgggattttccacatgtcataggcatggcaaaaaaaaa

SEQ ID NO: 75937 - DNA, 110 bp, synthetic construct
  source 1..110: mol_type = other DNA
gatgcgtcctgagcccgccccaaagtgagcagaccccagtgcactgagggcttctccacagcctagctgcctgcacaccacatgcgcatcgtccaggtcccagctgtcat

SEQ ID NO: 75938 - DNA, 110 bp, synthetic construct; identical to SEQ ID NO: 75937
  source 1..110: mol_type = other DNA

SEQ ID NO: 75939 - DNA, 110 bp, synthetic construct
  source 1..110: mol_type = other DNA
attatatcctgtagtttttcccccacccacttctctctttctctgtctctttcattccttccttccatctcctcttgccccacgcctgaaaatgcaggttcctggggcca

SEQ ID NO: 75940 - DNA, 110 bp, synthetic construct
  source 1..110: mol_type = other DNA
tccttccttccatctcctcttgccccacgcctgaaaatgcaggttcctggggccagcctcataagagcaatgcttctgactccaagccgggtgggcaggccctctacaga

SEQ ID NO: 75941 - DNA, 110 bp, synthetic construct
  source 1..110: mol_type = other DNA
gggaccccgaggcacccccccaaccccctctgccctttggctgtggagtcagtccaaagtgtgacctttatctctgcttgccggctctagccatctggtggaaggctgga

SEQ ID NO: 75942 - DNA, 110 bp, synthetic construct
  source 1..110: mol_type = other DNA
cacaggactcatcccacaaaaggtgcccatccgcttctacctcacctctgcccagttctcccccggttctctccagttcagatacttatcgcccttggaaaaaaatcaag

SEQ ID NO: 75943 - DNA, 110 bp, synthetic construct
  source 1..110: mol_type = other DNA
ttctcccccggttctctccagttcagatacttatcgcccttggaaaaaaatcaagacaagctagtcttgcaggtagtttcgagggaagctcagactttttctgggtgact

SEQ ID NO: 75944 - DNA, 110 bp, synthetic construct
  source 1..110: mol_type = other DNA
ctcctcggagccaagactcatgaggaaagaattccacctatctatccatctctctcttttgctgcttggagctgaacaatacctggagccttgcccaggctacggttcct

SEQ ID NO: 75945 - DNA, 110 bp, synthetic construct
  source 1..110: mol_type = other DNA
actttgattctataggacacctttatctccagcaaccttccttctcccctctcctctccaccaacacacctcccaatgcccagctattagagcagaaaatcaaagaagag

SEQ ID NO: 75946 - DNA, 110 bp, synthetic construct
  source 1..110: mol_type = other DNA
gtgggatggtgaggaagaggtcccagatgcagagggacagctgtgtggcaatgtggcctcaggggagaaaacctgaccacatgacaatgactcagcacgggatgaacaca

SEQ ID NO: 75947 - DNA, 110 bp, synthetic construct
  source 1..110: mol_type = other DNA
tacaattacacaccaattacactccggaaatggagagtcggccgtcaccgggagttctgggtacgtcaatgagaagcctttctcacttcgctcatgtttccaaggggcca

SEQ ID NO: 75948 - DNA, 110 bp, synthetic construct
  source 1..110: mol_type = other DNA
aaacattgaaggagaaaaatccatagagaaagccagaagtcataaatctatcacgtctattgagcttgctcaaccaaattagtacccttaacccttgtaaataataggta

SEQ ID NO: 75949 - DNA, 110 bp, synthetic construct
  source 1..110: mol_type = other DNA
ccattttatgttaacctgtgaggtctcatcctagtgaaatgtattttggggaatatttttctaaagagctcagggacatatttaagacacctctaaggaccgagggaccc

SEQ ID NO: 75950 - DNA, 110 bp, synthetic construct
  source 1..110: mol_type = other DNA
gaggtggaggagtgttgaactggataaaccccaaggatctcctgtataacacagggaactacatccaatattctgtgatcaatcataaaggaaaaaaatatgaaaaagaa

SEQ ID NO: 75951 - DNA, 110 bp, synthetic construct
  source 1..110: mol_type = other DNA
gatctcctgtataacacagggaactacatccaatattctgtgatcaatcataaaggaaaaaaatatgaaaaagaaggtgcatatgtatactgaattactttgctatacaa

SEQ ID NO: 75952 - DNA, 110 bp, synthetic construct
  source 1..110: mol_type = other DNA
acctagcagaagacggtgatcgccacagttttctccattttgaaaatgttacatttctaacaggattcagctaggacaatacacagtggacctaaagagattaattgatt

SEQ ID NO: 75953 - DNA, 110 bp, synthetic construct
  source 1..110: mol_type = other DNA
tctaacaggattcagctaggacaatacacagtggacctaaagagattaattgatttcaccctttccatggccgtgatgtcatttgtgggtcaacgtcacatgaggttatg

SEQ ID NO: 75954 - DNA, 110 bp, synthetic construct
  source 1..110: mol_type = other DNA
cctgctatccctctctgcctagaatcaccagcccttccctctctgctgccaggtcctcacccacagccacacttgagctctccagcgagtctccgaggaggctcagactc

SEQ ID NO: 75955 - DNA, 110 bp, synthetic construct
  source 1..110: mol_type = other DNA
ctcacccacagccacacttgagctctccagcgagtctccgaggaggctcagactcagttccctacagcaagtccacttgcctccccttctccgccaagtcaaaggtcttc

SEQ ID NO: 75956 - DNA, 110 bp, synthetic construct
  source 1..110: mol_type = other DNA
aaaaaaaaacccaaaggtagtactatcagtgccccattcttcaaatggggaaaccgaagctcagaagaggtaaacgacctgctaaggtcacacaggccactggacagagt

SEQ ID NO: 75957 - DNA, 110 bp, synthetic construct
  source 1..110: mol_type = other DNA
gaagctcagaagaggtaaacgacctgctaaggtcacacaggccactggacagagtggacgcggatggagactcaggtcatcaggcctcgctaagcaggatgccaggggtc

SEQ ID NO: 75958 - DNA, 110 bp, synthetic construct
  source 1..110: mol_type = other DNA
catccggctgaagaaaggcagattcagagaagctgacaagctgcctcaaggtcgcgtggtggaagggacagcgtgcgggcataaacccacatccgcctcttccagaaccc

SEQ ID NO: 75959 - DNA, 110 bp, synthetic construct
  source 1..110: mol_type = other DNA
aggctcgcgctggaagggaacccaggaagcatggaacttgctctctctttctttagatgaggagattgaggacaaggaaagcagcccaagcttaagcagatgagaattgg

SEQ ID NO: 75960 - DNA, 110 bp, synthetic construct
  source 1..110: mol_type = other DNA
cttttgttatcagacctaccccatgttgtctttgactgttttgttttctcagaaaagccttatagtactgtaccaaataagaggctcaagaatatttgcactgtgcctct

SEQ ID NO: 75961 - DNA, 110 bp, synthetic construct
  source 1..110: mol_type = other DNA
agccttatagtactgtaccaaataagaggctcaagaatatttgcactgtgcctcttgtgttcagacagcctctattctctagggaataagcttttactaaattttcctgt

SEQ ID NO: 75962 - DNA, 110 bp, synthetic construct
  source 1..110: mol_type = other DNA
tcaaaacacctctctcctcaatatgcatctagctcccggcagcagtgggctgcttgggggccctgcagacctggagcctcctatgcacttaactgcacagtgtccgcctc

SEQ ID NO: 75963 - DNA, 110 bp, synthetic construct
  source 1..110: mol_type = other DNA
gggggccctgcagacctggagcctcctatgcacttaactgcacagtgtccgcctccttctctgctgacaggtggcagctggagggcttggtcaactctccgaactacaac

SEQ ID NO: 75964 - DNA, 110 bp, synthetic construct
  source 1..110: mol_type = other DNA
atatacagaccattcttagctcaagggttggcaaagacaagccgctggccgggactgcagacccctggtctaaacaatgaacaaaacagcacacccagggctgatgggta

SEQ ID NO: 75965 - DNA, 110 bp, synthetic construct
  source 1..110: mol_type = other DNA
aaaatggtccctcctcagcttctcatctccaggcagctttgggaactttaactggggtggtgggggtgggagatccagtccagagaggttctgactccttgctttaagca

SEQ ID NO: 75966 - DNA, 110 bp, synthetic construct
  source 1..110: mol_type = other DNA
ccgatctttggggggcgagtggggtggttttggggctcagaggggtgagagccgtgacctgtttgaccctctccttcctccctccccctagtggcgttttgccttcagcc

SEQ ID NO: 75967 - DNA, 110 bp, synthetic construct
  source 1..110: mol_type = other DNA
gcaagctgctccaagcttggcctccgattcctccgattcctccgattcctcatccccaccagcatttgcccaaacacaaactctcgagctgtggatctagcacagagccc

SEQ ID NO: 75968 - DNA, 110 bp, synthetic construct
  source 1..110: mol_type = other DNA
aactggaatcacttccttcctcttgaccctctctgaggttgtgcagtccctccgtggttcggtggggagctggggtggtcggggcaggggcccattgacagtttgggggt

SEQ ID NO: 75969 - DNA, 110 bp, synthetic construct
  source 1..110: mol_type = other DNA
gacataaaccaatacaagcagagccaaaaataagacctgagtgtgggaaagtgagtgcatgtagtcacctggcagcagctgctcataatgatgacaggggtctggcagca

SEQ ID NO: 75970 - DNA, 110 bp, synthetic construct
  source 1..110: mol_type = other DNA
ctctcccaatcaaattttgttttcattgttattttatgttccttctctattttccttgaccagatccgcaaattaacaaaattgcctcttattgggtttctgctgctttt

SEQ ID NO: 75971 - DNA, 110 bp, synthetic construct; identical to SEQ ID NO: 75970
  source 1..110: mol_type = other DNA

SEQ ID NO: 75972 - DNA, 110 bp, synthetic construct
  source 1..110: mol_type = other DNA
attgcctggaaccagtgtagtattttattaaacacagctcagccctagccttcagctatagatacgctattatatgtcttgaaaatagataaagaaaataagaaacagca

SEQ ID NO: 75973 - DNA, 110 bp, synthetic construct
  source 1..110: mol_type = other DNA
tagaggaaaatcctctaaattagctcctctatgtacggagatggcatgtgacctcggatgggagaatggtatgtacgaaaaccctgagttttggattaaccatcaccaga

SEQ ID NO: 75974 - DNA, 110 bp, synthetic construct
  source 1..110: mol_type = other DNA
tgaagaggctacatcagaacttgaggtctgactggaagctattctatctctgtagtgaatgcctggtgctgtcagtcagaggtttggattgaagatactaggaaactcac

SEQ ID NO: 75975 - DNA, 110 bp, synthetic construct
  source 1..110: mol_type = other DNA
tctgttgaatatctagctttctgtctttatgggctcattaaatctgctctcagtacttagttccagttctttcttctgccttcagtctactgggatgtgaacatctttgg

SEQ ID NO: 75976 - DNA, 110 bp, synthetic construct
  source 1..110: mol_type = other DNA
cttagttccagttctttcttctgccttcagtctactgggatgtgaacatctttggtcccagcttattaaccttgtatgtgtgggaagagtgtgcactccgtgtgagatcc

SEQ ID NO: 75977 - DNA, 110 bp, synthetic construct
  source 1..110: mol_type = other DNA
aactgtgccattgggagagactcaaggaagagcttatgagattgtccaagggggaagaaaaatagcctatgatttttatcatcgataagcccagtgtcatttctttcaga

SEQ ID NO: 75978 - DNA, 110 bp, synthetic construct
  source 1..110: mol_type = other DNA
tcacgctgatgattattccttgagacctcttcctccagggtcctgtccctgcaatgagtcactgctggcccttgctttcccataagaacctccaagaccctcatgtgagt

SEQ ID NO: 75979 - DNA, 110 bp, synthetic construct
  source 1..110: mol_type = other DNA
gagtcactgctggcccttgctttcccataagaacctccaagaccctcatgtgagtctgtctcagtttcttatggagttcctgctttgccttggaacccagcccacatgaa

SEQ ID NO: 75980 - DNA, 110 bp, synthetic construct
  source 1..110: mol_type = other DNA
catgtctgcaacctacaccaccgcccacggtgatgctggatcccccactcactgagtgaggccaggggctgaacctgcaccctcagggatactcgtcagatttgtttctg

SEQ ID NO: 75981 - DNA, 110 bp, synthetic construct; identical to SEQ ID NO: 75980
  source 1..110: mol_type = other DNA

SEQ ID NO: 75982 - DNA, 110 bp, synthetic construct
  source 1..110: mol_type = other DNA
tatttgtttatatgttagttgtttttactttcataagtaaatcccacaacccacttagataaatatcatcttcatggttgtcatttggcctaggtcacagcttaggttag

SEQ ID NO: 75983 - DNA, 110 bp, synthetic construct
  source 1..110: mol_type = other DNA
tcgtatacaaagccgatgagacccacactagctgcaagttaacgcttgctggcctcttgcagtcaacccgccagcccgacttggtaaacaagaactcaggcagagagagg

SEQ ID NO: 75984 - DNA, 110 bp, synthetic construct
  source 1..110: mol_type = other DNA
ttagtttgagggaatctgagctagattatttcctcccttcttggctcaagattccctcaaatctcactgctaggatttttttccctttggcttctgaccttgttaatatc

SEQ ID NO: 75985 - DNA, 110 bp, synthetic construct
  source 1..110: mol_type = other DNA
ctcaaatctcactgctaggatttttttccctttggcttctgaccttgttaatatcccatagctgtcttatcaggtttttacaccttagtgtgaattagtttattggcttc

SEQ ID NO: 75986 - DNA, 110 bp, synthetic construct
  source 1..110: mol_type = other DNA
gacctagaggattatatttatgcagattagattatttttcatgccttggtctctcacccaaaaaacagttagttactagtctgctctgggtggtcccctcagtcacctct

SEQ ID NO: 75987 - DNA, 110 bp, synthetic construct
  source 1..110: mol_type = other DNA
acccaaaaaacagttagttactagtctgctctgggtggtcccctcagtcacctcttccagcttggtttttctcaagagttgcatgcaactttctttcagtgatttatgca

SEQ ID NO: 75988 - DNA, 110 bp, synthetic construct
  source 1..110: mol_type = other DNA
gtgagaggcaatcaaatcttaacagaaatatgagagcttgtttaacactcatattcaagacacttgatagcttactcttcaaatagcagttgtaactgataatttctcat

SEQ ID NO: 75989 - DNA, 110 bp, synthetic construct
  source 1..110: mol_type = other DNA
acagactgtggcataacaggaagcatcaagatcaaaagagatcaaaagagatacagttgcttcgtcgatgtgagaaccgtcctttttgacatcaatatcagcgtcttcta

SEQ ID NO: 75990 - DNA, 110 bp, synthetic construct
  source 1..110: mol_type = other DNA
tcaagttgttctgctttgatactctacacattttcaagaaacattactaaggcctcttcatcatctgggtcacttgatacttcttcttctctattttttttttttttttt

SEQ ID NO: 75991 - DNA, 110 bp, synthetic construct
  source 1..110: mol_type = other DNA
actaaggcctcttcatcatctgggtcacttgatacttcttcttctctatttttttttttttttttttttttttgtcacttgaaatcactctacaatagtagttggccaaa

SEQ ID NO: 75992 - DNA, 110 bp, synthetic construct
  source 1..110: mol_type = other DNA
aacagctgcgctccatgccagatgggcattttccctcccttttcaaggagccagcgcagctgggaggggctcctgttgctcttcagctttggatctgccttctctccagg

SEQ ID NO: 75993 - DNA, 110 bp, synthetic construct
  source 1..110: mol_type = other DNA
actctaacaagaactgcaacaatggcgagtcccccagatgatacaagccctttctgtttctcagatgaaacaactctttgggtttgtccgcagctccttagtacattcac

SEQ ID NO: 75994 - DNA, 110 bp, synthetic construct
  source 1..110: mol_type = other DNA
gtttctcagatgaaacaactctttgggtttgtccgcagctccttagtacattcacaagataattattctatggcaagtctttttttttttttttttgtattttgcctttt

SEQ ID NO: 75995 - DNA, 110 bp, synthetic construct
  source 1..110: mol_type = other DNA
gctggacatttagggcctcagagtctaataaaatgacttgggctgctgtaagtagaaagtcatgagagggttttttgaactgttttaatataatcaatttggctacagtg

SEQ ID NO: 75996 - DNA, 110 bp, synthetic construct
  source 1..110: mol_type = other DNA
ataccttcactgcctctgtggaactgctgaatagagccatcaacttggaagatctattgtcttcgagtctgcaactccttgaaacctcttcctgggtgactgagtgtcat

SEQ ID NO: 75997 - DNA, 110 bp, synthetic construct
  source 1..110: mol_type = other DNA
agccttgtaccaaggcacatggcttggtaagcggagcctgagctagatttcaggcgttactttattcctcgtgaccagatgcctgtgtagaataaatatcttatacaacc

SEQ ID NO: 75998 - DNA, 110 bp, synthetic construct
  source 1..110: mol_type = other DNA
tggattaaggatatagcattgctgcaagctatggtgtaggtcacagatttggctcagatctggtttccacagctgtggtgtaggccacacagctgcagctccgatttgac

SEQ ID NO: 75999 - DNA, 110 bp, synthetic construct
  source 1..110: mol_type = other DNA
aagctatggtgtaggtcacagatttggctcagatctggtttccacagctgtggtgtaggccacacagctgcagctccgatttgacccctggcccagaactttcatatgcc

SEQ ID NO: 76000 - DNA, 110 bp, synthetic construct; identical to SEQ ID NO: 75999
  source 1..110: mol_type = other DNA

SEQ ID NO: 76001 - DNA, 110 bp, synthetic construct; identical to SEQ ID NO: 75999
  source 1..110: mol_type = other DNA

SEQ ID NO: 76002 - DNA, 110 bp, synthetic construct
  source 1..110: mol_type = other DNA
cttgcaaactgttggacagaaactaccctaattctgtgtcagcatgacggtttgcaaagtgtataagctggaaaggcaacagggattccagcaaaaaggaagtcacagtt

SEQ ID NO: 76003 - DNA, 110 bp, synthetic construct
  source 1..110: mol_type = other DNA
aaagtgtataagctggaaaggcaacagggattccagcaaaaaggaagtcacagtttagtgtaatgtaatcacagaggtgacatcctatcacttttggcacattctactca

SEQ ID NO: 76004 - DNA, 110 bp, synthetic construct; identical to SEQ ID NO: 76002
  source 1..110: mol_type = other DNA

SEQ ID NO: 76005 - DNA, 110 bp, synthetic construct; identical to SEQ ID NO: 76003
  source 1..110: mol_type = other DNA

SEQ ID NO: 76006 - DNA, 110 bp, synthetic construct
  source 1..110: mol_type = other DNA
aggtccagaatagaaatcctcctttttctcccgccccaacccaaccctcctctcctcccatagacgctgtcttgggagactgcactaccgtgggcacagctgctcaggag

SEQ ID NO: 76007 - DNA, 110 bp, synthetic construct
  source 1..110: mol_type = other DNA
catacaatgtttcattgaaacggtgtagcactctttgccaacaagccatactggaattgttggtctcttaacagtacagtggagatatttacactatatacaccaagctt

SEQ ID NO: 76008 - DNA, 110 bp, synthetic construct
  source 1..110: mol_type = other DNA
attgttggtctcttaacagtacagtggagatatttacactatatacaccaagcttcacacacccaggttctcaaaggtctttcattacactagatcacatttgattccat

SEQ ID NO: 76009 - DNA, 110 bp, synthetic construct
  source 1..110: mol_type = other DNA
gtgagtctgttccagtggctctgggatggagcatgaatggagcagtgcagtgtctgggaaggaggcctctcttactagctgtgtggtttaaggcaagtcccttcaactct

SEQ ID NO: 76010 - DNA, 110 bp, synthetic construct
  source 1..110: mol_type = other DNA
gggaaggaggcctctcttactagctgtgtggtttaaggcaagtcccttcaactctatgggcctcagaatgctccctttatttatttgtttatttattttttgtcttttca

SEQ ID NO: 76011 - DNA, 110 bp, synthetic construct
  source 1..110: mol_type = other DNA
tttctctgggcttttggaaagcaaatggtgcagatgcctctttatgaacaatgtaaatgatggcttcctcaatccacttcccgtctttggtttacatcttttggaatttc

SEQ ID NO: 76012 - DNA, 110 bp, synthetic construct
  source 1..110: mol_type = other DNA
aatgatggcttcctcaatccacttcccgtctttggtttacatcttttggaatttcaaatagcttttctactgagcctactattcctgctctttgttgctagagattgggc

SEQ ID NO: 76013 - DNA, 110 bp, synthetic construct
  source 1..110: mol_type = other DNA
caccagctgcaagtttggggtccccaggttcgccttcaattctgatcagctggttacaaattcggggctcccagtgagcccccttaggttcaataattcattagcaagag

SEQ ID NO: 76014 - DNA, 110 bp, synthetic construct
  source 1..110: mol_type = other DNA
aggattagtggccagattaggaatgtggagccctccttgaagctgtagagattgctgacctggtttctgttgctgctctcttctctcctggaaagattctcataccatac

SEQ ID NO: 76015 - DNA, 110 bp, synthetic construct
  source 1..110: mol_type = other DNA
ggatccttaacctgttgtaccacaagggaactcctggtcttctctttttgtgcaccccctcagcagccagtatgaaaccaggagagggtagtcttcagtgtaatgaggta

SEQ ID NO: 76016 - DNA, 110 bp, synthetic construct
  source 1..110: mol_type = other DNA
cccctcagcagccagtatgaaaccaggagagggtagtcttcagtgtaatgaggtatttatttagagcttttgccctgctgattccagtcagtttcacaaatgtggttagg

SEQ ID NO: 76017 - DNA, 110 bp, synthetic construct
  source 1..110: mol_type = other DNA
caccctagttatgtaattaggtctggagcagaccttgcatgatcaggtaccaaacaattaaggattaggcaaaaccaggaatcaacctgggacatcacaatgattctgaa

SEQ ID NO: 76018 - DNA, 110 bp, synthetic construct
  source 1..110: mol_type = other DNA
gagaggcaaaagctccctataaagcagcttgcattagcccaggggatgacactctttgtgtcagatgctcgcaagtcatacttataaaaaatggcctcgacacaccaaga

SEQ ID NO: 76019 - DNA, 110 bp, synthetic construct
  source 1..110: mol_type = other DNA
aggccagggatcgaacacgcaacctcatgatccctagtcagattcgtttctgctgcaccactacgggagctcctcctttgctgtttgtgagcctctgctcctgactaggt

SEQ ID NO: 76020 - DNA, 110 bp, synthetic construct
  source 1..110: mol_type = other DNA
caccactacgggagctcctcctttgctgtttgtgagcctctgctcctgactaggtgccgctaatactgggaatgtaatgtaagatatcagtgcctggcctccgatggttc

SEQ ID NO: 76021 - DNA, 110 bp, synthetic construct
  source 1..110: mol_type = other DNA
gcgacagctcagtgatctgagagtttcaccaaagatactttttcagctagaagatatcaggccaaaccacttataagagccaaagaatcaagaacagaagttagcatgtt

SEQ ID NO: 76022 - DNA, 110 bp, synthetic construct
  source 1..110: mol_type = other DNA
ctcacctagaagatgctgtcccgggccttgccccagacactccagtttctcttggcccagatctctgctgcttatcctatgcattctgaagatgtcttgcagccgttgcc

SEQ ID NO: 76023 - DNA, 110 bp, synthetic construct
  source 1..110: mol_type = other DNA
cccagatctctgctgcttatcctatgcattctgaagatgtcttgcagccgttgcctccagctcttgtcccggtcttcctccatcactcttctacctgtttacaaccctga

SEQ ID NO: 76024 - DNA, 110 bp, synthetic construct
  source 1..110: mol_type = other DNA
agcataatgcagaataatggccaggcccatatggtggggtctggacagcttatgccacacagtgaaaataacatcaacagttactggcgttcctgttgtggcgcagcaga

SEQ ID NO: 76025 - DNA, 110 bp, synthetic construct
  source 1..110: mol_type = other DNA
tacgtggctatccaaaattaaatcaccccctgagctcttccttgagaagtcagaaacgtttttctcttaccagatttgttttttagccagagtctaaaagaaaatcagag

SEQ ID NO: 76026 - DNA, 110 bp, synthetic construct
  source 1..110: mol_type = other DNA
tttgtttccactgaaccgctatgggaactcctgaattttttaaatcaagaggtcgtcatacttcatatactcttgtgtaagctgtttttttgttgttgtcgttcttcagc

SEQ ID NO: 76027 - DNA, 110 bp, synthetic construct
  source 1..110: mol_type = other DNA
ggacgtcttctgtcttctccattagactgtaaacgcctcgagtgtaagtttcctactctgcctgcctacccaacgggtgacatacacaatactcaatattcaataaatgc

SEQ ID NO: 76028 - DNA, 110 bp, synthetic construct
  source 1..110: mol_type = other DNA
accctgaaactcagatagtcaataacaacaataagcacagccctccgccttctagaaggatgtcaaacaagcatgtggcatggcctacaactttctaatagggaagacca

SEQ ID NO: 76029 - DNA, 110 bp, synthetic construct
  source 1..110: mol_type = other DNA
tttctcattccagcaaatactctacctggcttgggtcagctgtatacctggctaaaccaattattttcatacattgctttcatagagagtaatataccataaaatataat

SEQ ID NO: 76030 - DNA, 110 bp, synthetic construct
  source 1..110: mol_type = other DNA
ctggcttgggtcagctgtatacctggctaaaccaattattttcatacattgctttcatagagagtaatataccataaaatataatcataaataccaattctttcctttct

SEQ ID NO: 76031 - DNA, 110 bp, synthetic construct
  source 1..110: mol_type = other DNA
tccatcacaggtgagattcctaggaattgtgatcacgccagggattaccaccatcctgcttatcatagcaataggtaagtcacctcaatttcagaatctcatcctaagaa

SEQ ID NO: 76032 - DNA, 110 bp, synthetic construct
  source 1..110: mol_type = other DNA
ctgcttatcatagcaataggtaagtcacctcaatttcagaatctcatcctaagaatctactttcaagggtcactcattaccaaagtcctatgttacattcctcctaaaac

SEQ ID NO: 76033 - DNA, 110 bp, synthetic construct; identical to SEQ ID NO: 76031
  source 1..110: mol_type = other DNA

SEQ ID NO: 76034 - DNA, 110 bp, synthetic construct; identical to SEQ ID NO: 76032
  source 1..110: mol_type = other DNA

SEQ ID NO: 76035 - DNA, 110 bp, synthetic construct
  source 1..110: mol_type = other DNA
gggttcattgaaatcataatcattactgaaaaagccttttctccctcctaccacatgctccctaggaggcaaagaagtgacaagtcttcgctgtctagatctttgtttct

SEQ ID NO: 76036 - DNA, 110 bp, synthetic construct
  source 1..110: mol_type = other DNA
tgctccctaggaggcaaagaagtgacaagtcttcgctgtctagatctttgtttctcattgacccttgtcagcccaacacacatattaatcttggaattgattctggcttg

SEQ ID NO: 76037 - DNA, 110 bp, synthetic construct
  source 1..110: mol_type = other DNA
ctcattttacagtttctgattgtgtgtgattgctgatgttagacattgatcatgtttaaaatattttcaattcagttcaataagagctcctattatatgctggatacttt

SEQ ID NO: 76038 - DNA, 110 bp, synthetic construct
  source 1..110: mol_type = other DNA
ataaaccagaaaagatgatgctcctttcacttaaaaaaaaataaaacataatgaaatacaataaatgccagctagagaaaagtggcactcagggaagctatctcagcact

SEQ ID NO: 76039 - DNA, 110 bp, synthetic construct
  source 1..110: mol_type = other DNA
atacaataaatgccagctagagaaaagtggcactcagggaagctatctcagcactgtgaatagacaatctcactaacttgggttcattcctattgttgaggaaaaagttt

SEQ ID NO: 76040 - DNA, 110 bp, synthetic construct
  source 1..110: mol_type = other DNA
tccaatctgctcctgctcacgtgctctccagccctgccacttgcctttcttcccaggctggagccgtcccagagatggctcatatcccagctgctgccaccatcacctca

SEQ ID NO: 76041 - DNA, 110 bp, synthetic construct
  source 1..110: mol_type = other DNA
ggctggagccgtcccagagatggctcatatcccagctgctgccaccatcacctcacatcctaacctctccaattttctcagcctccccaggggtgaggaccagctcaggc

SEQ ID NO: 76042 - DNA, 110 bp, synthetic construct; identical to SEQ ID NO: 76040
  source 1..110: mol_type = other DNA

SEQ ID NO: 76043 - DNA, 110 bp, synthetic construct; identical to SEQ ID NO: 76041
  source 1..110: mol_type = other DNA

SEQ ID NO: 76044 - DNA, 110 bp, synthetic construct
  source 1..110: mol_type = other DNA
caggctttcttctgcttcctgccaagatggtgggcatacttgatcatcagtacctgttgcagcatgctttcccaaggcagccttggagacctgtcattctctctggtctt

SEQ ID NO: 76045 - DNA, 110 bp, synthetic construct
  source 1..110: mol_type = other DNA
gttgcagcatgctttcccaaggcagccttggagacctgtcattctctctggtcttttgactccatttgtgagacatgctttagcctcgctgggtatatgaagtcatattt

SEQ ID NO: 76046 - DNA, 110 bp, synthetic construct
  source 1..110: mol_type = other DNA
taaagagagtcctaagccaaaattggtaccatcaacagctattgctgttatcactccttttcttaggtgatcatcccttcaatgtatatttatgattttcttgctgtata

SEQ ID NO: 76047 - DNA, 110 bp, synthetic construct
  source 1..110: mol_type = other DNA
ttactttccacccagagggcaaaaactttctgggactggtaaagtgagccataaccttataattttaaatgaatactgcttcctttcttttaaagagattcttggaactc

SEQ ID NO: 76048 - DNA, 110 bp, synthetic construct
  source 1..110: mol_type = other DNA
ccatgagggagatgttgttttggacacggagggcgtgtcaaagtaaagacacatcagcccttcttttaagaactttatggcatcagctagtctcatgatctccatgtaaa

SEQ ID NO: 76049 - DNA, 110 bp, synthetic construct
  source 1..110: mol_type = other DNA
ccttttgttccctgttcattgcagcacacctacctcatggcccttgcactcacaattccattctctgggatactcctccccccaggcagctacataattcactttcctaa

SEQ ID NO: 76050 - DNA, 110 bp, synthetic construct
  source 1..110: mol_type = other DNA
ttccattctctgggatactcctccccccaggcagctacataattcactttcctaaatctcactttttagagggggtcatctctaactccttatctaaaagcaaacctccc

SEQ ID NO: 76051 - DNA, 110 bp, synthetic construct; identical to SEQ ID NO: 76049
  source 1..110: mol_type = other DNA

SEQ ID NO: 76052 - DNA, 110 bp, synthetic construct; identical to SEQ ID NO: 76050
  source 1..110: mol_type = other DNA

SEQ ID NO: 76053 - DNA, 110 bp, synthetic construct
  source 1..110: mol_type = other DNA
cagcctccttttgaactccaccagttctcttttaccttctttggtggaatccagatctcacttactggcttctcttcccttgtttaaacccttaaactggagcttccaca

SEQ ID NO: 76054 - DNA, 110 bp, synthetic construct
  source 1..110: mol_type = other DNA
tctcacttactggcttctcttcccttgtttaaacccttaaactggagcttccacaagactcaccaggcattccctctcatgctccctaatctatccacctaatcacaaca

SEQ ID NO: 76055 - DNA, 110 bp, synthetic construct
  source 1..110: mol_type = other DNA
agcatgaaaaggaattcttgtcaaattagatagtcctgtctgtttcatataattgcccaaaaatctcctgtaatgctcatttcagtagtggtgttttttaatcttcagtt

SEQ ID NO: 76056 - DNA, 110 bp, synthetic construct
  source 1..110: mol_type = other DNA
cccaaaaatctcctgtaatgctcatttcagtagtggtgttttttaatcttcagttataatggccttgctgttcatgaataacttgtccaaatgtggcctaaattttattt

SEQ ID NO: 76057 - DNA, 110 bp, synthetic construct
  source 1..110: mol_type = other DNA
aagaagcttacccagggagagaagagaaagactcaggtccaaattttgagtagcttcatattaaagttttggacacagaagaaaaagccaacaacgataacaacaacaaa

SEQ ID NO: 76058 - DNA, 110 bp, synthetic construct
  source 1..110: mol_type = other DNA
tgatgtggatggaaggtgaaacgtgtcttcataattgtatctctaatacacagcaatctcccacgggacctaacacatggtcagtcctccataaacgaatgagcagtgtg

SEQ ID NO: 76059 - DNA, 110 bp, synthetic construct
  source 1..110: mol_type = other DNA
atctcccacgggacctaacacatggtcagtcctccataaacgaatgagcagtgtgtgaatgattgcagcaaatttcaataacaaattagatattgagtgagggcactgct

SEQ ID NO: 76060 - DNA, 110 bp, synthetic construct
  source 1..110: mol_type = other DNA
ttccatgacttattgaaatgctgaatttggagcaactatcttatttttctgggaagaaacgaagcattagattacacagggaagacttagcgaggaaaggaaaaccttga

SEQ ID NO: 76061 - DNA, 110 bp, synthetic construct
  source 1..110: mol_type = other DNA
agacagggctgccgtgcccacatcagaacagaaggacgaggagactgggtactatagcttccactctgacatttaaagctccaattgtggtgcttttgctggacatcaca

SEQ ID NO: 76062 - DNA, 110 bp, synthetic construct
  source 1..110: mol_type = other DNA
actgattctcttataaggatggaaaacagaattgtgcaaggggaagtggacagactgaagaagtacaacagcctgggctcgaatcccgcttccgcgacttgccctgaata

SEQ ID NO: 76063 - DNA, 110 bp, synthetic construct
  source 1..110: mol_type = other DNA
caggcctttctgactgagatccttgagtcttaagagtctcaagcctcctttccctcagctttacttgtgaagattaaaaaacactgacctcgcagtttttgtaaagattc

SEQ ID NO: 76064 - DNA, 110 bp, synthetic construct
  source 1..110: mol_type = other DNA
ggaaacactccacctcttcagtagttgtaggactgcagtccaatggcaaagggcagggatacagctaggggtttaggtctggtgacaataatgcgatatataacactctg

SEQ ID NO: 76065 - DNA, 110 bp, synthetic construct
  source 1..110: mol_type = other DNA
gggatacagctaggggtttaggtctggtgacaataatgcgatatataacactctggcctctgggccagcgtaattcatgttcctcccaaatgcggtgcatgcttaccccc

SEQ ID NO: 76066 - DNA, 110 bp, synthetic construct
  source 1..110: mol_type = other DNA
cccttgtgataggcctcagagagctccctcaccccttctgctgtgtgaggacacagtgagaagatggcagtctgtgaactaaatgggctctcaccaaatactgaatctgc

SEQ ID NO: 76067 - DNA, 110 bp, synthetic construct
  source 1..110: mol_type = other DNA
ctgcaaagggcttgggcccagtggctgatgcacgcaacaaacccaatcttagcgcagtctttttcatcagaaagtatgtattgagggatacaatgaaggggtaaaagtgg

SEQ ID NO: 76068 - DNA, 110 bp, synthetic construct
  source 1..110: mol_type = other DNA
ggtgaaacacaaacacaactcagtttaccatgaccaggcaaagattagcccactgggtagctgtattttttctgcctctgtcagctgcttcacatccttcctagaaccag

SEQ ID NO: 76069 - DNA, 110 bp, synthetic construct
  source 1..110: mol_type = other DNA
ggtagctgtattttttctgcctctgtcagctgcttcacatccttcctagaaccaggtgagtaatggattagaagtaaataaataaaacaaagcaccccattggagacata

SEQ ID NO: 76070 - DNA, 110 bp, synthetic construct
  source 1..110: mol_type = other DNA
cgtatctttttggacgtgtgcaggtctcagtaatgcctgtgctttgctttttggcgagtccagtagctaagaaggtgtgcacgtggactgtagccatatgtgtgtcacag

SEQ ID NO: 76071 - DNA, 110 bp, synthetic construct
  source 1..110: mol_type = other DNA
gagtccagtagctaagaaggtgtgcacgtggactgtagccatatgtgtgtcacagatgacaagtatgtttgcaattgttagtaaaatggcactagtgctttacttcttac

SEQ ID NO: 76072 - DNA, 110 bp, synthetic construct; identical to SEQ ID NO: 76070
  source 1..110: mol_type = other DNA

SEQ ID NO: 76073 - DNA, 110 bp, synthetic construct; identical to SEQ ID NO: 76071
  source 1..110: mol_type = other DNA

SEQ ID NO: 76074 - DNA, 110 bp, synthetic construct
  source 1..110: mol_type = other DNA
ccctttgatttggaatcaaactaggaggaacccgcgatggcttacctggaccattctccttcctccaggctttacagcttcagccacaccttcagagatgcgcggcggtg

SEQ ID NO: 76075 - DNA, 110 bp, synthetic construct
  source 1..110: mol_type = other DNA
gggacgaagagggtgcacctgcatattctgtaccttgtgggtcttgatgtatctagcatttgataattggtcgcctgtgttcgacctggagcagcaaagagccatgagac

SEQ ID NO: 76076 - DNA, 110 bp, synthetic construct
  source 1..110: mol_type = other DNA
gcatttgataattggtcgcctgtgttcgacctggagcagcaaagagccatgagacacatgagtctcctgagtatttgatctctttcatgactcaaaagccattaacagcc

SEQ ID NO: 76077 - DNA, 110 bp, synthetic construct
  source 1..110: mol_type = other DNA
tggatgtaggatccacatccatggatcccttcctcacaccctccaacctcagctcctggcatcacatctcctcctcttaccctgactcccctgcctttcttatgggaccc

SEQ ID NO: 76078 - DNA, 110 bp, synthetic construct
  source 1..110: mol_type = other DNA
ctggcatcacatctcctcctcttaccctgactcccctgcctttcttatgggaccctcgtggttatatcgaggccacccagataattcaggataatctttctcctgcaaga

SEQ ID NO: 76079 - DNA, 110 bp, synthetic construct
  source 1..110: mol_type = other DNA
gggctcttacactccctttatttccctgccctaatcaccccctttctaggtagtagatgactatgctccagagtctgctgaaattattcaaaatagctaaccctaaacct

SEQ ID NO: 76080 - DNA, 110 bp, synthetic construct
  source 1..110: mol_type = other DNA
cccaggtttccctgtcctcactctgcatccccagtctggagtgtaaccctaaccccagcctctgaacagcagctgagattattcctgtgtctttggacaggacccagagc

SEQ ID NO: 76081 - DNA, 110 bp, synthetic construct
  source 1..110: mol_type = other DNA
cagcctctgaacagcagctgagattattcctgtgtctttggacaggacccagagcctcttctccctacccctccgtagcactggaggccagacttatggctgcaggaatc

SEQ ID NO: 76082 - DNA, 110 bp, synthetic construct
  source 1..110: mol_type = other DNA
ccgatgtattggaaggagcaggtgagggagataaggagcagagttcctaccctttctcactttgcctccctctttgctatgacgcaagggcagctgctgatgtccattag

SEQ ID NO: 76083 - DNA, 110 bp, synthetic construct
  source 1..110: mol_type = other DNA
ctcactttgcctccctctttgctatgacgcaagggcagctgctgatgtccattagcaaggtatgagttttgaggcatttttccctggaaagagagtgtgatagagtcatg

SEQ ID NO: 76084 - DNA, 110 bp, synthetic construct
  source 1..110: mol_type = other DNA
atctgctgtcatgaaaagaaagtagaatgaagaggctcttcagccatttcttactttcctagcttaattaaaacaaaaaagacaataacactcaccactcctctcctgga

SEQ ID NO: 76085 - DNA, 110 bp, synthetic construct
  source 1..110: mol_type = other DNA
ccactgagccacagtgggaactcctcaagaaggttttcactcaggtttgcacaatatcagagctcagctctagggaggtcagtctgtctgaaggtataggatcagcatga

SEQ ID NO: 76086 - DNA, 110 bp, synthetic construct
  source 1..110: mol_type = other DNA
tcaagttgttggctgggacttggatcttatccaaaatctcagctgagatggggaatctaattccaagctcactcatgtggtgttggcagttctgggtccctctgcacagg

SEQ ID NO: 76087 - DNA, 110 bp, synthetic construct
  source 1..110: mol_type = other DNA
gtgccgtcaaggcgggaaccactgcttttagcctgtatcattttcttcacgtccaaagtagctatgattttgcagtacacaaggggacttacattgttttgagctgttct

SEQ ID NO: 76088 - DNA, 110 bp, synthetic construct
  source 1..110: mol_type = other DNA
tggagatgacacatgagaccacagtgaaaatccaggcaagttaatgaaaacctgaagacaagttaatgaaagacagtgacaaaggaagtgtagttaaaaaagacagatgt

SEQ ID NO: 76089 - DNA, 110 bp, synthetic construct
  source 1..110: mol_type = other DNA
gctgcatgatgacaaactgtgatggtctgtggcatgtgtcactttgtctgggccatgggatgcccggataactggttaaacattacttcccgctgtgtccgtgaggatga

SEQ ID NO: 76090 - DNA, 110 bp, synthetic construct
  source 1..110: mol_type = other DNA
tgggatgcccggataactggttaaacattacttcccgctgtgtccgtgaggatgattctatgaggttagcatttgagtaggtggactgagcaaagcaaatggccctctcc

SEQ ID NO: 76091 - DNA, 110 bp, synthetic construct
  source 1..110: mol_type = other DNA
aataatggatttcctcaaattcagtccactctccttcaaaatttcttagactaagagtactcagttctatcctttgatactatctttatctgttgcaagtctatcactca

SEQ ID NO: 76092 - DNA, 110 bp, synthetic construct; identical to SEQ ID NO: 76091
  source 1..110: mol_type = other DNA

SEQ ID NO: 76093 - DNA, 110 bp, synthetic construct
  source 1..110: mol_type = other DNA
caaaattagttgggtatgtttgcaggtatcatagaaatacacaggcctaatgagctttaaaaattcttcccaagattaccatactctgctggtgggcaaaacaaaacaac

SEQ ID NO: 76094 - DNA, 110 bp, synthetic construct
  source 1..110: mol_type = other DNA
caatatctgtatttcgtcatctttcttgtgaactactatgatggtagaggcccgaaagttattggatggagaaaccaggcgattaattagtatcctcttattaggatttc

SEQ ID NO: 76095 - DNA, 110 bp, synthetic construct
  source 1..110: mol_type = other DNA
gggaactctgcagaggacacatattttagatgcatgtgctttatgactgtttggggtgcaaattaaatgtaagagggcaaaccccaaataccaagtgtgtggccaaatta

SEQ ID NO: 76096 - DNA, 110 bp, synthetic construct
  source 1..110: mol_type = other DNA
gtgcaaattaaatgtaagagggcaaaccccaaataccaagtgtgtggccaaattacagaggtttgtgcatccatagggagaggcagatatagggattctaattaggaaaa

SEQ ID NO: 76097 - DNA, 110 bp, synthetic construct; identical to SEQ ID NO: 76095
  source 1..110: mol_type = other DNA

SEQ ID NO: 76098 - DNA, 110 bp, synthetic construct; identical to SEQ ID NO: 76096
  source 1..110: mol_type = other DNA

SEQ ID NO: 76099 - DNA, 110 bp, synthetic construct
  source 1..110: mol_type = other DNA
tatttgctttagcgcataagcagctgtgctacctatagggacatcttggttctaccaacgtaataatacaaaaagggaaaagtgcacacattttggtgctgggatactta

SEQ ID NO: 76100 - DNA, 110 bp, synthetic construct
  source 1..110: mol_type = other DNA
caacgtaataatacaaaaagggaaaagtgcacacattttggtgctgggatacttagcttccagatacaactctagatgttgcctaaatgttccataaagattttaatatc

SEQ ID NO: 76101 - DNA, 110 bp, synthetic construct
  source 1..110: mol_type = other DNA
cccccccccgtcaaagtaatgtattaaaacagatgaagaaactaagctcagagaagttaaggacatatctttgagtcacatagtaagaaattgccatgagagaaattcaa

SEQ ID NO: 76102 - DNA, 110 bp, synthetic construct
  source 1..110: mol_type = other DNA
aattattatagacatttagtgtataagaatatctacgttgggttgaattgtatagtatggtatcagaaaatgatcaggagttcctgtcatggcgcagtggttaacgaatc

SEQ ID NO: 76103 - DNA, 110 bp, synthetic construct; identical to SEQ ID NO: 76102
  source 1..110: mol_type = other DNA

SEQ ID NO: 76104 - DNA, 110 bp, synthetic construct
  source 1..110: mol_type = other DNA
tttctcaaaaattctcttctagaattcaaaatccccttttgttttctcagcaatcaatgattagctggaagattaagtattaggaggtttttccaagaggatcaattaaa

SEQ ID NO: 76105 - DNA, 110 bp, synthetic construct
  source 1..110: mol_type = other DNA
cttgctttggccaatactgcagaagcaacattctgccggttcctgatctaggcctcatgagagcttgcattcgttgttcctctcactcgaaattctctgtatttgcatgt

SEQ ID NO: 76106 - DNA, 110 bp, synthetic construct
  source 1..110: mol_type = other DNA
catgagagcttgcattcgttgttcctctcactcgaaattctctgtatttgcatgtgaataaacctagtctagcctactggatgcaaaagacaagtgacccaggtgtccct

SEQ ID NO: 76107 - DNA, 110 bp, synthetic construct
  source 1..110: mol_type = other DNA
atgctgcaggagaccccctggctgagtggcgtcagccctcggaaccatgagagaccatggtcatgagagactcttactgtttcagccactaagtttggggtggtttgctg

SEQ ID NO: 76108 - DNA, 110 bp, synthetic construct
  source 1..110: mol_type = other DNA
catggtcatgagagactcttactgtttcagccactaagtttggggtggtttgctgcaggtaacatcctcctccttcccaggctggctaggccctgtgctttctcctactc

SEQ ID NO: 76109 - DNA, 110 bp, synthetic construct
  source 1..110: mol_type = other DNA
ttccattcaatcaacttgatccctcttcttcatagcatgtaccattatctgcaactatcctgtccactcattttcttgtttataccctatcctcttttgaaaataaggat

SEQ ID NO: 76110 - DNA, 110 bp, synthetic construct
  source 1..110: mol_type = other DNA
tatcctgtccactcattttcttgtttataccctatcctcttttgaaaataaggatctatttcccagagcttaaaacagtgcttgtcacacaatgggtctttaattcttga

SEQ ID NO: 76111 - DNA, 110 bp, synthetic construct
  source 1..110: mol_type = other DNA
ttactctgctccctgaaatctccataacctcccactgttacccttgtacacgctgaccctgcagacatccattccaggaaggcagtgtcctcaactgtggacgcgaagac

SEQ ID NO: 76112 - DNA, 110 bp, synthetic construct
  source 1..110: mol_type = other DNA
gattcaaattggcactgtaggcacatgaacaaatttctcctaatttcctaaataactagaaataatataaaagatgataggtaaaaaggaggaagaagaaagaaaaccag

SEQ ID NO: 76113 - DNA, 110 bp, synthetic construct
  source 1..110: mol_type = other DNA
ttattcacttcctatctcttcatctcactgctcttagtattgcatgcttgcttgcttgcttgctttccaggccacacctgcaagtttctagggagggatcaaattggagc

SEQ ID NO: 76114 - DNA, 110 bp, synthetic construct
  source 1..110: mol_type = other DNA
ttgcttgctttccaggccacacctgcaagtttctagggagggatcaaattggagctgatttgcaacctatgccacagcttgcagcaatgccagagccttaactcacggat

SEQ ID NO: 76115 - DNA, 110 bp, synthetic construct
  source 1..110: mol_type = other DNA
cttctacgttacagagagaaggtgaagaaatcaaagaggaataaccaccaatcctacctaattgctttatttatatagtacctgtctcattcattttttcccctccttat

SEQ ID NO: 76116 - DNA, 110 bp, synthetic construct
  source 1..110: mol_type = other DNA
tcacagaggtggcttggatcccatgttgctgttgctgtggtgcagcacctgtgacctgctatttcccgtttagctttctcaagtgtgggtcaagaaccattctgcagggg

SEQ ID NO: 76117 - DNA, 110 bp, synthetic construct
  source 1..110: mol_type = other DNA
ctgctatttcccgtttagctttctcaagtgtgggtcaagaaccattctgcagggggttgtggctcagagggttaaggacctggcgtagtgtctgtgacgatgtgggtttg

SEQ ID NO: 76118 - DNA, 110 bp, synthetic construct
  source 1..110: mol_type = other DNA
aagcaatcatcggggccacaaatacggccagttgccttctccgaacccctcattcaggaagatctgcagctgcatgtgcttactgtaggtctggagagcgagggcaaggg

SEQ ID NO: 76119 - DNA, 110 bp, synthetic construct
  source 1..110: mol_type = other DNA
aggaagatctgcagctgcatgtgcttactgtaggtctggagagcgagggcaagggccgaggtgtttgactgtcattagacattttggattagggacctctgttttcaacc

SEQ ID NO: 76120 - DNA, 110 bp, synthetic construct
  source 1..110: mol_type = other DNA
gtttgaggtgttcaaaaatcattaatctgccttttagtcatctcatttataatgaaggaaattttcaaggttgagctaatgattttccaaccttgtaggcaccaagcttc

SEQ ID NO: 76121 - DNA, 110 bp, synthetic construct
  source 1..110: mol_type = other DNA
ggcccttgacaacttgacagatgtttgtttggagggcatccatgggaaagaaaaagagagttggagttttgttctgaatcacgtaggttccaatctgaaggactgacata

SEQ ID NO: 76122 - DNA, 110 bp, synthetic construct
  source 1..110: mol_type = other DNA
gagagttggagttttgttctgaatcacgtaggttccaatctgaaggactgacatagccaccttctctgccaacataaaacatgtctttattttctccttcccttcttact

SEQ ID NO: 76123 - DNA, 110 bp, synthetic construct
  source 1..110: mol_type = other DNA
agctgcatcggcaaataaaacgttcctctgagacaaaccaaggagatgattaaatacttgaaaaacataacgtagacacatgtaacagaatcagtaaatgcaacgaaaat

SEQ ID NO: 76124 - DNA, 110 bp, synthetic construct
  source 1..110: mol_type = other DNA
cctttcaatgaagcctccctgtcacttttcttccatgtgccgaataatattagcaaccatcatactgcagttgctttccatttcactctattctcataattccacattta

SEQ ID NO: 76125 - DNA, 110 bp, synthetic construct
  source 1..110: mol_type = other DNA
cttccatgttgaaaacagactcaaaaggcacaagtatgcaagcaggcagaacgaattgaactctatttaacaatccagataagagatgatggtgggtttggccagagaac

SEQ ID NO: 76126 - DNA, 110 bp, synthetic construct
  source 1..110: mol_type = other DNA
gacagaaaactgggtctgtcaacctggagaaaaactagaatgggtagcgtggagacagacagcctggagtgattcgagtctagaataaccacatttgaagttgtgagctg

SEQ ID NO: 76127 - DNA, 110 bp, synthetic construct
  source 1..110: mol_type = other DNA
cactcagtaattagaacacatagaacagtatgcatgaggaaaataaaaagaaatgtgtccacaggagtcttcacaggaacagaaaaaagtgattatatgattatgcatgt

SEQ ID NO: 76128 - DNA, 110 bp, synthetic construct
  source 1..110: mol_type = other DNA
atagctggaacagagatggaccgggtgagctgccttgactaagcctagcccctgtcagccgacatggagatgctcaaagatgtgtaagtgatcacataaagttttccact

SEQ ID NO: 76129 - DNA, 110 bp, synthetic construct
  source 1..110: mol_type = other DNA
gaaagaatttactttctgccagttacgttaataagtgcctaagagaaactctactaactgccttcatattttaaatatattccagtgatcacttatcatccttgtcgatt

SEQ ID NO: 76130 - DNA, 110 bp, synthetic construct
  source 1..110: mol_type = other DNA
tgctactctagtccccattttactgaccgggaactgaattgtaatgggctaaggaagttgcttaagaacacacagctaataaatgatatcagaatttggacttgagcggt

SEQ ID NO: 76131 - DNA, 110 bp, synthetic construct
  source 1..110: mol_type = other DNA
attgacacaagtaagtggctccatttagaagctattatggaaataaagaacaactgctaaaatgttgatttatcataatgtaggtaaattgcttcactttgctgctaacg

SEQ ID NO: 76132 - DNA, 110 bp, synthetic construct
  source 1..110: mol_type = other DNA
tgggattgaaatttccagccctctaatcactgggttggttcccctggcagccagcaccatccttaagtgcttaccaaagccaccttattaacatcaactcagctgtggct

SEQ ID NO: 76133 - DNA, 110 bp, synthetic construct
  source 1..110: mol_type = other DNA
accatccttaagtgcttaccaaagccaccttattaacatcaactcagctgtggctgaaagggggtggttaggaatactgagacgcccttatcactcttatcacttaggaa

SEQ ID NO: 76134 - DNA, 110 bp, synthetic construct
  source 1..110: mol_type = other DNA
atgaacaccccaaaatgtaagggcagatttcactcattttttgcattcttaacctttgccagactttggaaaataaatagctttgcaaatgtgattagcggtccaagcct

SEQ ID NO: 76135 - DNA, 110 bp, synthetic construct
  source 1..110: mol_type = other DNA
tacgggaattaatcatgagtactaggggtcttccataaaaactagaacggaatatatgatgttggcctagcagcttgtggctgagaaggcaatgtgtgttacgtgttgac

SEQ ID NO: 76136 - DNA, 110 bp, synthetic construct
  source 1..110: mol_type = other DNA
tcaggaccttctgtttctgtggagctgggatgtattaacctcctggtatgtggatacattcattaacctagaagctccccaacccctgtacttttgagaattttgtaaag

SEQ ID NO: 76137 - DNA, 110 bp, synthetic construct
  source 1..110: mol_type = other DNA
acattcattaacctagaagctccccaacccctgtacttttgagaattttgtaaaggctttattacataagcatgattaatcattaacttcatttctagccccagtcctcc

SEQ ID NO: 76138 - DNA, 110 bp, synthetic construct
  source 1..110: mol_type = other DNA
gagcttcggggcacgttcttggtaactgagcctcgttgtcaagagagagaagcaggagagaatcgatgagggcagtgagcagaggcgacattgtataagttcttgttggc

SEQ ID NO: 76139 - DNA, 110 bp, synthetic construct
  source 1..110: mol_type = other DNA
gagagaatcgatgagggcagtgagcagaggcgacattgtataagttcttgttggctgtggcagggaaacttccgcaagcaatgggaaaaacacaagtgctttaaacatgg

SEQ ID NO: 76140 - DNA, 110 bp, synthetic construct
  source 1..110: mol_type = other DNA
ccactgggccgtgccaagctgggaccggatgtccggcagccgggctctgaatcacgtggacacttccctgtagatgcatgaatgggaaagaatctaccctgcaagagcac

SEQ ID NO: 76141 - DNA, 110 bp, synthetic construct
  source 1..110: mol_type = other DNA
agagtaggtatttttggcctctccatcctgccacgtacgtaatcacagacatcgtgatctaatatgacagctgccagagaaaacttccagtttctttggagatgttctta

SEQ ID NO: 76142 - DNA, 110 bp, synthetic construct
  source 1..110: mol_type = other DNA
tctaagcctctcctttccccaagtcttcccctgtcacccacccaccgaattctagaaaacaagctattcaatgcaccactgattgggaattgcggtaattctattttacg

SEQ ID NO: 76143 - DNA, 110 bp, synthetic construct
  source 1..110: mol_type = other DNA
aaaacaagctattcaatgcaccactgattgggaattgcggtaattctattttacgcgacagttgcatttccactgaattttattcctaattctctcctctaagtccctta

SEQ ID NO: 76144 - DNA, 110 bp, synthetic construct
  source 1..110: mol_type = other DNA
aactgtgagaaataaattttgttgtttattagccacctagtctgtggtgtttttttttacagcagcccaaagggaccaagccgtgagctatgactctctttggtaatttc

SEQ ID NO: 76145 - DNA, 110 bp, synthetic construct
  source 1..110: mol_type = other DNA
tttacagcagcccaaagggaccaagccgtgagctatgactctctttggtaatttcacattttccaagacagtgcttttccgggactgtgtattttgcatgtgcttcatat

SEQ ID NO: 76146 - DNA, 110 bp, synthetic construct
  source 1..110: mol_type = other DNA
gtgaatttttgagcttaagaatatgatattgatgtttattttttcagccccagcactgtgcttgtttaagagtcatcactgatgcatttaagacagaacatggcttacgt

SEQ ID NO: 76147 - DNA, 110 bp, synthetic construct
  source 1..110: mol_type = other DNA
tgctcagccagcacctggcccctcacctttcactactcttcgttccagtcccatctagcttctttcatccaaatggatcctatctttgtctgtctctattccctttttca

SEQ ID NO: 76148 - DNA, 110 bp, synthetic construct
  source 1..110: mol_type = other DNA
aaaatgtactggaatgctgattggcagctaccaaaaactgacttcttggccatcaagcataattggtgatcctggaacttctgtggtgcccctaccttgtgtcttatcat

SEQ ID NO: 76149 - DNA, 110 bp, synthetic construct
  source 1..110: mol_type = other DNA
gagccccttgcagactcctagaatctttcccaatttcctaggtaactttctccacctcctaggatgatcacagttctgtgtccacccaggaggcttcttgtggaatccca

SEQ ID NO: 76150 - DNA, 110 bp, synthetic construct
  source 1..110: mol_type = other DNA
ctcctaggatgatcacagttctgtgtccacccaggaggcttcttgtggaatcccaaccctctgcgctgcttcagagataactttctccatcccctaggtaaatttcagct

SEQ ID NO: 76151 - DNA, 110 bp, synthetic construct
  source 1..110: mol_type = other DNA
cgttggcagggccgtcatgaactgtgtggcgcttctgctccatccccacctgcggctctgcattcctcgccgggtccctattctggaaaccttttcctactctttcgatt

SEQ ID NO: 76152 - DNA, 110 bp, synthetic construct
  source 1..110: mol_type = other DNA
agcaggggtcatggtccagtcatgctccctgtagcttctggcctgagaggtctgttctcatggctaccatgatccacatccaatgccttagccctgcatgatacctgggt

SEQ ID NO: 76153 - DNA, 110 bp, synthetic construct
  source 1..110: mol_type = other DNA
tgcaacctccaacgaatgttccgtaaccattcccactagctcactgcagcccttgaaaattctgctctcctttggcttagtcaaatctaaaccatctgcctcctctattg

SEQ ID NO: 76154 - DNA, 110 bp, synthetic construct
  source 1..110: mol_type = other DNA
acagtactgcttatttgtttaccatcggaaaggcaaagccaaggaaaataaaacatttcagtaaaagggtaggtttccatctaacagaaacgagaatttcaagctattgc

SEQ ID NO: 76155 - DNA, 110 bp, synthetic construct
  source 1..110: mol_type = other DNA
acaagagacagagggaagtgtcatggcagtcacagcttgggaagcagcagaacttaattagtcacagcccttccccgtcttccttgccaaagggattactcatcattttg

SEQ ID NO: 76156 - DNA, 110 bp, synthetic construct
  source 1..110: mol_type = other DNA
gtagacagtgttgaaaccgagtccagcgcagatgaggaggtgtggccgtgaagcggaggagccggctggggccacagctggaaggtcttgtggggcccgggaagatgtgg

SEQ ID NO: 76157 - DNA, 110 bp, synthetic construct
  source 1..110: mol_type = other DNA
cgtgaatgtgccaaccgaccgcccacgggcccagcttcttccagagaagacccagtcataagctaccgcctctggaagaggaggatttcacacgtcacttgtaaaaagcc

SEQ ID NO: 76158 - DNA, 110 bp, synthetic construct
  source 1..110: mol_type = other DNA
tcataagctaccgcctctggaagaggaggatttcacacgtcacttgtaaaaagcccaggatctgctctcccgaaagatccggccgtaaagtagtgctgtcataaaagtga

SEQ ID NO: 76159 - DNA, 110 bp, synthetic construct
  source 1..110: mol_type = other DNA
ctacaggaaagaaacccatggacctgaaaacagatctgggggtgccagactgcagggggaggctgtggggaggcctggggtttggaggctcatccatccaaacgattgcc

SEQ ID NO: 76160 - DNA, 110 bp, synthetic construct
  source 1..110: mol_type = other DNA
gaggcctccaaccagagggtccctgcccagacaatcaacagcagcagcagccatatcctgatccacacagctgggatggcacatctgaaagtcaggacgtcaaggaaggg

SEQ ID NO: 76161 - DNA, 110 bp, synthetic construct
  source 1..110: mol_type = other DNA
tccttgctgcagcttctgcataactcacttccaaaaagcaggattaaaacgtcccccatcccaagtctgaccgaccagtctcttccttcctggctgacaccagggcacag

SEQ ID NO: 76162 - DNA, 110 bp, synthetic construct
  source 1..110: mol_type = other DNA
agggaccgccggcccttctctgggggtcttgggacccggccgtatgccaaggccgagtgggggcctcaaagttccctgcagctgttagcccctcacaatcacgggtcaga

SEQ ID NO: 76163 - DNA, 110 bp, synthetic construct
  source 1..110: mol_type = other DNA
attggactgtcccacaggaacgtcgtgttctgtcttcttagatgtgttattagaaacaatgtcctgggcagtagctaactagaaaagtgtaatttccaaattaatcttac

SEQ ID NO: 76164 - DNA, 110 bp, synthetic construct
  source 1..110: mol_type = other DNA
ctgttacagagacaagaagatgccccttcatggccccaccgcagctccgggcctgctccctgggctacgagtggaggcacctccattcaagtctctcttaagccccccag

SEQ ID NO: 76165 - DNA, 110 bp, synthetic construct
  source 1..110: mol_type = other DNA
tctgactgctggacggtgctagaaacggcagccacgcacacacttaggccagtgcgacatgcacatgtgatggctggagcagggacagccctattaaaccatgaggtagc

SEQ ID NO: 76166 - DNA, 110 bp, synthetic construct
  source 1..110: mol_type = other DNA
cagggccgttcgagagttttctctcaccaccgaaaaaccaccccagatgcaagagcccagttctgcaggtcagagtccgggccgggccggcttcccacgctgggtcccag

SEQ ID NO: 76167 - DNA, 110 bp, synthetic construct
  source 1..110: mol_type = other DNA
aaccaccccagatgcaagagcccagttctgcaggtcagagtccgggccgggccggcttcccacgctgggtcccaggccaaagttgaggcggcaggggcggcgctgacctg

SEQ ID NO: 76168 - DNA, 110 bp, synthetic construct
  source 1..110: mol_type = other DNA
cctctctttatctgtcatggttcttgtagctttgcagtgaagcctgcctgcctatggtgtcagtacagtgaacttgtttttcttttgcagatttgttttggttatttatt

SEQ ID NO: 76169 - DNA, 110 bp, synthetic construct
  source 1..110: mol_type = other DNA
gggcagggtgtgcggctgcacgacttcctctcacctctgagctgatctcagacgggcccgtctgaaggcagcacgggcctcgatcttgcgccactaacttagcccctcaa

SEQ ID NO: 76170 - DNA, 110 bp, synthetic construct
  source 1..110: mol_type = other DNA
gcgtccccctgcggtggggactccacctctgcgaccggcctgctgtgaggtcctgccagcaagaacacggggctcacctcagtgtccctctcgtttccttccgcatggac

SEQ ID NO: 76171 - DNA, 110 bp, synthetic construct
  source 1..110: mol_type = other DNA
agataagtaaagtggccggcagtttgacagagatgctaacgggccacagaacataaactactgctgaagtcgagactttcttatttcccaaatgggccacgacctcaggc

SEQ ID NO: 76172 - DNA, 110 bp, synthetic construct
  source 1..110: mol_type = other DNA
ctctcaggctgtgaggaggccgcacagagcagcgcgtgtagcgaatgcggcacgtgcttcgtccggggactcagagcgtcccacacgcaggtgtcccttttgcagccgcc

SEQ ID NO: 76173 - DNA, 110 bp, synthetic construct
  source 1..110: mol_type = other DNA
gacgtcctgttggggtgtggcccgctgcctcctttgctcttgcccagtggggtgaacttgccaaggctgtgtcctcaggggtgtctggatgacctcggaagcccaggtga

SEQ ID NO: 76174 - DNA, 110 bp, synthetic construct
  source 1..110: mol_type = other DNA
acttgccaaggctgtgtcctcaggggtgtctggatgacctcggaagcccaggtgacacccatggcttcaagggcctgagccccctgccggtggctgtgtgcacacctgga

SEQ ID NO: 76175 - DNA, 110 bp, synthetic construct
  source 1..110: mol_type = other DNA
aatgcatgtgacacagctttacccttgtaacgtgttttcctttttgaagcatagctggttcctggcgcacagcagagtgactcagggccgttctgtttcccgttctttcc

SEQ ID NO: 76176 - DNA, 110 bp, synthetic construct
  source 1..110: mol_type = other DNA
tggttcctggcgcacagcagagtgactcagggccgttctgtttcccgttctttccgctgtggtttatcacagggtggtgactctagtgtcctgtgtgatgcaggagggtc

SEQ ID NO: 76177 - DNA, 110 bp, synthetic construct
  source 1..110: mol_type = other DNA
cagatccaaatttcaactaaactgggttagttgaatccacggaggcaaacccaggtatatgaagggccaactgctctagcaaacagcattcaacagcacactgaaaactc

SEQ ID NO: 76178 - DNA, 110 bp, synthetic construct
  source 1..110: mol_type = other DNA
gcatcagggcccaccggtcggaggccacacagccctgtgggtccctcgagctgtgacaagcctccttgtctgggtaaaaacagcacgcgttgactctctgagagttctgc

SEQ ID NO: 76179 - DNA, 110 bp, synthetic construct
  source 1..110: mol_type = other DNA
acaagcctccttgtctgggtaaaaacagcacgcgttgactctctgagagttctgccagcggaagcccagatcagtccctgcaggactaagtcacgtcatcgagggctcgt

SEQ ID NO: 76180 - DNA, 110 bp, synthetic construct
  source 1..110: mol_type = other DNA
cgccggtaccacaaggcacatgacgcgagtgggcacgacaggctcacggctccatctcggaccacagctgccaggctgtcagacagcaactctgattacagccacaagca

SEQ ID NO: 76181 - DNA, 110 bp, synthetic construct
  source 1..110: mol_type = other DNA
acccatcagagtcccaaacactccctttcgccaataagagtcgccttgaaatgtgcattcaaagactaagaacagaaagggacacacgcccgcgcccgcacgcacacaca

SEQ ID NO: 76182 - DNA, 110 bp, synthetic construct
  source 1..110: mol_type = other DNA
cagcatacggaattcccaggccagggggtcagatgagagctgcaattgtgaacaacaccacagctggggcaacaccggctccttcaacccactgtgccaagcagaggatc

SEQ ID NO: 76183 - DNA, 110 bp, synthetic construct
  source 1..110: mol_type = other DNA
cttagtaacatgcgattgaggttcctccatggcttgacagctcaaggtcttttcgtggcctgacggctcatttcttttgaggggcgaataatattccgctgcctggaggt

SEQ ID NO: 76184 - DNA, 110 bp, synthetic construct
  source 1..110: mol_type = other DNA
tgcagggaacaggtttctgtgggtttggtgacagccgcctgcgaacacgaagatgcagacacagctgtcgggagcgtgcaggcgccgggcctcgccaggtgcagggccag

SEQ ID NO: 76185 - DNA, 110 bp, synthetic construct
  source 1..110: mol_type = other DNA
cagacacagctgtcgggagcgtgcaggcgccgggcctcgccaggtgcagggccaggtcactccactcctgcgtcagcatgcccatctgcagaaaaggggtgaccacgtgt

SEQ ID NO: 76186 - DNA, 110 bp, synthetic construct
  source 1..110: mol_type = other DNA
aaaaacaaaccagaaaaccacgcccccgggataccaggcaggtgatgagggtgcgggggaggcgtgggaccagactcgggactattagcagaagtcctcattctgagacc

SEQ ID NO: 76187 - DNA, 110 bp, synthetic construct
  source 1..110: mol_type = other DNA
ctctggaaaacacgctggcggctgcaacactcaacctagggtccctgtctgaccagcaattccgcccccagctacacatccgcgaacgaaatgaaaatacacgtccacac

SEQ ID NO: 76188 - DNA, 110 bp, synthetic construct
  source 1..110: mol_type = other DNA
gcaattccgcccccagctacacatccgcgaacgaaatgaaaatacacgtccacaccaacacttgtacacagggagttcccgttgtggctcggtgggttaagaacctgact

SEQ ID NO: 76189 - DNA, 110 bp, synthetic construct
  source 1..110: mol_type = other DNA
aggaagtatctgtccaggttatttcgtaatcctggtaaacaccgcttttccttgcaacagttatttatgtatttattgcaaaatcacgatttttctggttgtaagagcag

SEQ ID NO: 76190 - DNA, 110 bp, synthetic construct
  source 1..110: mol_type = other DNA
ctgtgacgcagggacagtctgggccttgcatctaaccggtatagtgtctgcacatgtcgcaaaagtgcttatgccaaagtaggccaccccacaccccagctgcctcgtca

SEQ ID NO: 76191 - DNA, 110 bp, synthetic construct
  source 1..110: mol_type = other DNA
ctcgcgggtgaagtgggggtcacgaggatagacctagctcctggggttcactgaggtcctccctgcaaggcccgcgaacgcaatgcctgtggagtacttgttagcacttt

SEQ ID NO: 76192 - DNA, 110 bp, synthetic construct
  source 1..110: mol_type = other DNA
gtcctccctgcaaggcccgcgaacgcaatgcctgtggagtacttgttagcactttggccctgaacttggcacctcaggaagtgttcctctgagcatctgccttggacgtg

SEQ ID NO: 76193 - DNA, 110 bp, synthetic construct
  source 1..110: mol_type = other DNA
cactggacctgcttcacagtctacttggcaggcctgtccacggggcctgagaaaggagtgtctgatggattccaaagctggaacttggctggttgaatgttctctgaagt

SEQ ID NO: 76194 - DNA, 110 bp, synthetic construct
  source 1..110: mol_type = other DNA
ccagtgggctgtgcatgtggcttcacagcattgtcatgagctcagattctggagacagagggtgttcagacctctgctccaccgcttactagttgtgcgaccgtgggcag

SEQ ID NO: 76195 - DNA, 110 bp, synthetic construct
  source 1..110: mol_type = other DNA
cagagggtgttcagacctctgctccaccgcttactagttgtgcgaccgtgggcagttacaccaccgcaccccgtgccagtgtccccctctccaaaacagggccaactcga

SEQ ID NO: 76196 - DNA, 110 bp, synthetic construct
  source 1..110: mol_type = other DNA
agagagggaaaatgctggaagtgggggagggccatgcactgggcgtatgagtttgagcctgtgcgtataatttaggctccgacgtagaaaatccagagggaaaaaagaat

SEQ ID NO: 76197 - DNA, 110 bp, synthetic construct
  source 1..110: mol_type = other DNA
agcctgtgcgtataatttaggctccgacgtagaaaatccagagggaaaaaagaataaggaagacagagcacggaacgcgagcaccctgggtggaaggcagccccacggga

SEQ ID NO: 76198 - DNA, 110 bp, synthetic construct
  source 1..110: mol_type = other DNA
cgctcaccctcagacctgcctcagactagcagtaacttgttccaggattcgccgcgtgtgtgtctgtgagtggccacaggacagtctagcagattctcgaagggtctgta

SEQ ID NO: 76199 - DNA, 110 bp, synthetic construct
  source 1..110: mol_type = other DNA
gtgtgtgtctgtgagtggccacaggacagtctagcagattctcgaagggtctgtaatccctgcggatggcaatcctgcctccacgcttcccccggcgcacgcctgctggt

SEQ ID NO: 76200 - DNA, 110 bp, synthetic construct
  source 1..110: mol_type = other DNA
tctgcctgctccgctccctggctgtgccagctgaggacctctctgagcgttttcgtttgtttatctgtgaagggaggacgtgaacgccctcaaggcttgtgcaagcccca

SEQ ID NO: 76201 - DNA, 110 bp, synthetic construct
  source 1..110: mol_type = other DNA
agcaggacgagactctggggagcagtcctgttcctctgagtgtctcgacactcagagcctgtctataccctgagcccccatccacctgcctggcttagagtgtctgagct

SEQ ID NO: 76202 - DNA, 110 bp, synthetic construct
  source 1..110: mol_type = other DNA
agcctgtctataccctgagcccccatccacctgcctggcttagagtgtctgagctccgacctgagggcaacagattgctgctaaaacagacagaatattcgcattcagat

SEQ ID NO: 76203 - DNA, 110 bp, synthetic construct; identical to SEQ ID NO: 76201
  source 1..110: mol_type = other DNA

SEQ ID NO: 76204 - DNA, 110 bp, synthetic construct; identical to SEQ ID NO: 76202
  source 1..110: mol_type = other DNA

SEQ ID NO: 76205 - DNA, 110 bp, synthetic construct
  source 1..110: mol_type = other DNA
gacgccttctgcagcgcacgttttgggagcgagtcgaggcatccgatgctctctggcccctcccattcctttacaggtggagaatccaagtctcagggcatcatacatgg

SEQ ID NO: 76206 - DNA, 110 bp, synthetic construct
  source 1..110: mol_type = other DNA
gcccctcccattcctttacaggtggagaatccaagtctcagggcatcatacatggctcaaggtcacacacagggtcgcaaggggaactctcggcctgaagctctttcacc

SEQ ID NO: 76207 - DNA, 110 bp, synthetic construct
  source 1..110: mol_type = other DNA
tccttgtcactgcttagtgcatctcttggggtagcgctcgaattgcagccccaacctttttcctgaccttgggcgtgacactcagctcttcgcgccacgcttttctccgt

SEQ ID NO: 76208 - DNA, 110 bp, synthetic construct
  source 1..110: mol_type = other DNA
ggagccacgacgggaacgctgagtgattgttctcttgaagacgaagtgactttaggacgtcagggtgccttctctgccttctcgtgcactgagtcctgagctgccgtgag

SEQ ID NO: 76209 - DNA, 110 bp, synthetic construct
  source 1..110: mol_type = other DNA
aaggtcacacagctagaaggaaccacatgagactctgacccaggggctcctcattctcggctatactcccttgtctgatgatacgggggatgaaaaagaggtttttgaga

SEQ ID NO: 76210 - DNA, 110 bp, synthetic construct
  source 1..110: mol_type = other DNA
ttcagagaggagctgcctgaggccccaagaggcacactgacttgtccaagctcccttggttgctacgaggtggaggctaaccagggactcccaggtctctgctgcagctc

SEQ ID NO: 76211 - DNA, 110 bp, synthetic construct
  source 1..110: mol_type = other DNA
ttggttgctacgaggtggaggctaaccagggactcccaggtctctgctgcagctcagatggattctgcaagcagcaagcaccactccctccctgtcactgccgtcccccc

SEQ ID NO: 76212 - DNA, 110 bp, synthetic construct
  source 1..110: mol_type = other DNA
caaccttggaagtcagaaattattccaaaagttttaatgtgaaaagaaaaccatgagctgagctgattgttttgcagtgatcatgagcgccaccttgtgggcacagggct

SEQ ID NO: 76213 - DNA, 110 bp, synthetic construct
  source 1..110: mol_type = other DNA
agctgagctgattgttttgcagtgatcatgagcgccaccttgtgggcacagggctacattggctgtgccgagtctgcaaggacacaggcacagactgcgcgtgggcaatg

SEQ ID NO: 76214 - DNA, 110 bp, synthetic construct
  source 1..110: mol_type = other DNA
gtattgcctgatcacatctaaacttttctccttgattttcaaggtccttagtactctagcctggagtcagcttacctttgctgtaaatagttttgtctctgcgggccgtg

SEQ ID NO: 76215 - DNA, 110 bp, synthetic construct
  source 1..110: mol_type = other DNA
gattgttattaccagttccaggatgaggggactgagctcagagggactatatggctggcacagggtcgcatcatgacaaagtggcactctttcccttgcctccattccag

SEQ ID NO: 76216 - DNA, 110 bp, synthetic construct
  source 1..110: mol_type = other DNA
ataagtgcatacaattggaaatagtctaaatatccaacaacaaaggaatgaatgaatacctgaggatattcatgtaacagaacagcagagtccatactattcgatgccta

SEQ ID NO: 76217 - DNA, 110 bp, synthetic construct
  source 1..110: mol_type = other DNA
atacctgaggatattcatgtaacagaacagcagagtccatactattcgatgcctaaaaatagtggctgtttcttgacatggaaagctgttcatcatatattggaagtaaa

SEQ ID NO: 76218 - DNA, 110 bp, synthetic construct
  source 1..110: mol_type = other DNA
agagcagtgtctctggaatatgagcacacacagctcagcaggaatggcatcactggggttggagaagggggggctcagtgaaaatgcagattctgattctgtagagccag

SEQ ID NO: 76219 - DNA, 110 bp, synthetic construct
  source 1..110: mol_type = other DNA
agctccagggcggggtctcatcctgccagagtggaaaacaccgactcaaggtcataaacatcctgctccgctttctaccccctacaacgcaagaagttgtcagccaagcc

SEQ ID NO: 76220 - DNA, 110 bp, synthetic construct
  source 1..110: mol_type = other DNA
taaatgccaaggcatctaccacataaaggttaaccaataagtattcttgctgacgctaatgggcaagatcccaaacacaacagaaattcctgaatatttaactccattgt

SEQ ID NO: 76221 - DNA, 110 bp, synthetic construct
  source 1..110: mol_type = other DNA
atactacaactgtactccagaaatttcggtatctgttgtctgagggctacatagggaagaacactaccttcaaaagctatcatttttattggcttggttacattctaaga

SEQ ID NO: 76222 - DNA, 110 bp, synthetic construct
  source 1..110: mol_type = other DNA
tcaaggacatggttttcctcgagtccagccgaggttctggtggaaggagccctcagacatcatatttacagcagttttaaaaatccagtgcttagtcatcagtgggtata

SEQ ID NO: 76223 - DNA, 110 bp, synthetic construct
  source 1..110: mol_type = other DNA
gacatcatatttacagcagttttaaaaatccagtgcttagtcatcagtgggtatagtctgtgtttaatctagtcctcttcaatgcctatcttgtgcccagcacttcaaat

SEQ ID NO: 76224 - DNA, 110 bp, synthetic construct
  source 1..110: mol_type = other DNA
agggaactccaaaaactattttaaaagtgggggaaaaagtcttagattcattccttagttcttattttcaacagctagactgaaatattaaactcatgagtctatggggc

SEQ ID NO: 76225 - DNA, 110 bp, synthetic construct
  source 1..110: mol_type = other DNA
tccttagcgtaatttacaatacccatcataaaatatttcatcaagaggaaacatttagatttcatataaaaccgcaaactccagaggactcagggacaacggggtcagct

SEQ ID NO: 76226 - DNA, 110 bp, synthetic construct
  source 1..110: mol_type = other DNA
ccgactggctctgtggccactccatcggttgagactttctctgaccgaggttagggttagcagagtgcctttaggctcctggaatttacttactattgagtcttctagag

SEQ ID NO: 76227 - DNA, 110 bp, synthetic construct
  source 1..110: mol_type = other DNA
gttagcagagtgcctttaggctcctggaatttacttactattgagtcttctagagggcctgagattctggcccacattgccccagaaacacaccccatttcttcctcctt

SEQ ID NO: 76228 - DNA, 110 bp, synthetic construct
  source 1..110: mol_type = other DNA
caaaccctatcttcttggatattagtcgggattctaacccactgagccacaatgggaactcctttctttgggttggaatttttcattcattcattcataccatgtaaatg

SEQ ID NO: 76229 - DNA, 110 bp, synthetic construct; identical to SEQ ID NO: 76228
  source 1..110: mol_type = other DNA

SEQ ID NO: 76230 - DNA, 110 bp, synthetic construct
  source 1..110: mol_type = other DNA
gcttttaaacataagacatgcctgccttccaccactcagaacctcttctctttcctcgagaagttgccaacctagcccggccctggtgaccccagcttacccgtgtgact

SEQ ID NO: 76231 - DNA, 110 bp, synthetic construct
  source 1..110: mol_type = other DNA
aaggaacggctcagcccagccccgttctccacgcctttgatgggggcatttctttggccccgttctgtctgggtctctgcgctcccactcgacctctccgatttctctct

SEQ ID NO: 76232 - DNA, 110 bp, synthetic construct
  source 1..110: mol_type = other DNA
ggccccgttctgtctgggtctctgcgctcccactcgacctctccgatttctctctcgcctcctgccctccttttgctctgaacccctgcccagctcacttttggggtctg

SEQ ID NO: 76233 - DNA, 110 bp, synthetic construct
  source 1..110: mol_type = other DNA
aacgtagggtaacagagtactgacaccgctgggtggcgatcagatgtgcctaacagtcatcagcacaggatgtcgtggtttttagctgctgtgattctttatcgcctgca

SEQ ID NO: 76234 - DNA, 110 bp, synthetic construct
  source 1..110: mol_type = other DNA
gtcatcagcacaggatgtcgtggtttttagctgctgtgattctttatcgcctgcacactctccctggggtggaggagtccagccctagtttcttgccagagtgaattccc

SEQ ID NO: 76235 - DNA, 110 bp, synthetic construct
  source 1..110: mol_type = other DNA
actggactccttcaaggaggagtttaactgttagaggctcttagtagtaggatgaataatgcctgcagtgtgggaaattatcatagaaagtgaagatttagtcgtttggg

SEQ ID NO: 76236 - DNA, 110 bp, synthetic construct
  source 1..110: mol_type = other DNA
ataatgcctgcagtgtgggaaattatcatagaaagtgaagatttagtcgtttggggtggaggaagcgcagcaacacagaagaatgaggaggggagaaataggctcctgtc

SEQ ID NO: 76237 - DNA, 110 bp, synthetic construct
  source 1..110: mol_type = other DNA
ggggccaggagcccccgcatgggaggtttgcatcttccattctattgattcacccctgattgccctccctctgcttcactcccccccccctcgcacccccacaaaaacgc

SEQ ID NO: 76238 - DNA, 110 bp, synthetic construct
  source 1..110: mol_type = other DNA
ctgattgccctccctctgcttcactcccccccccctcgcacccccacaaaaacgcccacagctgtattagtattaggcctcatggctaaggcacagggtagggaagaaat

SEQ ID NO: 76239 - DNA, 110 bp, synthetic construct
  source 1..110: mol_type = other DNA
cagaaaggtttttcctaattctctccagtttggccaagaccttgaacattttctaacgataatcctcaagttcacatagcagtctgcagtgcagaagccccttcttggca

SEQ ID NO: 76240 - DNA, 110 bp, synthetic construct
  source 1..110: mol_type = other DNA
acgataatcctcaagttcacatagcagtctgcagtgcagaagccccttcttggcatttttacgggtacgcccatagcccacctgcagttgcaataggaagctgaacgttg

SEQ ID NO: 76241 - DNA, 110 bp, synthetic construct
  source 1..110: mol_type = other DNA
cacatacactcaggcgcacgtgcacacacaccccctcaccctcatactcaatcccatgaaattcagccacaagcttgaggcgcttatgccatcagaccccacctgggact

SEQ ID NO: 76242 - DNA, 110 bp, synthetic construct
  source 1..110: mol_type = other DNA
agagacatccttgaaaggaccgtgttacaaagagagaaagaggggcttgctttcatttcttgatttaaaagttgtatctgcctgcacgactttctcctgcaacgcgacgc

SEQ ID NO: 76243 - DNA, 110 bp, synthetic construct
  source 1..110: mol_type = other DNA
tttcttgatttaaaagttgtatctgcctgcacgactttctcctgcaacgcgacgcaaagagctgatggtacttgacctgcacttcttgcccgggacgcaagccccattgt

SEQ ID NO: 76244 - DNA, 110 bp, synthetic construct
  source 1..110: mol_type = other DNA
atgtctggtgtcccgggagctacacgtcggttggagcccagagctatgtctgcagccctggtttgaggatgtgggtcagtggtggatgagaaaggtggaaacaaatgtgt

SEQ ID NO: 76245 - DNA, 110 bp, synthetic construct
  source 1..110: mol_type = other DNA
ttgaggttttgctaaggtttcactctgagtgaacttgccaatcagagtgaaaccaggatagagaaaggggtctcaagccgcagaagtgggaggaagcaatctactttgtc

SEQ ID NO: 76246 - DNA, 110 bp, synthetic construct
  source 1..110: mol_type = other DNA
attccaccacggtttctgtactatttttaacagctttatcgagatcgagcccatagaccatacccttcacccacttaaaatgtacgattcaatagttcttaggagagccg

SEQ ID NO: 76247 - DNA, 110 bp, synthetic construct
  source 1..110: mol_type = other DNA
gttccaggagcccacgtgggacttccctgccaccccgctggccagaactgggtcccatggccacatacccacacacagctggcagggaacttaagacgtggaattcttac

SEQ ID NO: 76248 - DNA, 110 bp, synthetic construct
  source 1..110: mol_type = other DNA
catggccacatacccacacacagctggcagggaacttaagacgtggaattcttactctgaaccatcatgagcctcttggaaactgctatcaccaaggaagaaggatgagc

SEQ ID NO: 76249 - DNA, 110 bp, synthetic construct
  source 1..110: mol_type = other DNA
tgaccccgtagccgttcaacgccatccagtgagactgtaatgatgctttttccaaaagagcaaggacgttcagcaagctctttaccacacacctgatgtaggtgggacgc

SEQ ID NO: 76250 - DNA, 110 bp, synthetic construct
  source 1..110: mol_type = other DNA
agttgggttctttttctggtgtggactgtcttgacagatctccgctagtctcacgcttgtgtctggggtcagctgctggcttgatgagcagctgggagactctagaatgg

SEQ ID NO: 76251 - DNA, 110 bp, synthetic construct
  source 1..110: mol_type = other DNA
ggtgcatcagttcatctcccaccgaggttccgaaaccaggtcgctgtggacctggagacgtctacgtgagtctgtgtgtaaacgaagccctgggactccagatccataac

SEQ ID NO: 76252 - DNA, 110 bp, synthetic construct
  source 1..110: mol_type = other DNA
agacgtctacgtgagtctgtgtgtaaacgaagccctgggactccagatccataaccccaaagtcttcacctctacctggctggtttcccctgcagtgagatgcacagctg

SEQ ID NO: 76253 - DNA, 110 bp, synthetic construct
  source 1..110: mol_type = other DNA
gagcgtggggtacataaggaaagaagaggggtagatgaacggggaaagaaggatcggagagcggaagaacccagtgcaaaaaggcgcctacgtgccgtgcgccatgaaac

SEQ ID NO: 76254 - DNA, 110 bp, synthetic construct
  source 1..110: mol_type = other DNA
ccgatggaagcggcttatgcgtggacgtgcatccactctggcaacttccctttcctgtcaccctgcgccagtgctgacacgtcagaacacatgccatttggttccacatt

SEQ ID NO: 76255 - DNA, 110 bp, synthetic construct
  source 1..110: mol_type = other DNA
tgtcaccctgcgccagtgctgacacgtcagaacacatgccatttggttccacattcatttttttcccttattgtacagtgaagctggggcactgaattaaaacctacaca

SEQ ID NO: 76256 - DNA, 110 bp, synthetic construct
  source 1..110: mol_type = other DNA
ttttcaggggcagggatttctgtgcctaggaaagccatcggattttggccaacatagcccattagacaattaacaccagctttcttgccaggttaacagctacaatctgt

SEQ ID NO: 76257 - DNA, 110 bp, synthetic construct
  source 1..110: mol_type = other DNA
ccggaagggaagttgctcgtccaaagaaagagaagcataactttaatcttttatttgagcttctcttctttaggctgagcctggagtaacttcattcctctcttcttgat

SEQ ID NO: 76258 - DNA, 110 bp, synthetic construct
  source 1..110: mol_type = other DNA
tgagcttctcttctttaggctgagcctggagtaacttcattcctctcttcttgatactgcaagcaaaccctaccacaggagagtaaagcccagggcccagggtatccagc

SEQ ID NO: 76259 - DNA, 110 bp, synthetic construct
  source 1..110: mol_type = other DNA
gatggatcaaccctgccttttttctgaagataaggcaaaaggctttatctctgacacaaccttatttctcaatttttttttttgtgtgtgtgtgtcagagggaagaaaaa

SEQ ID NO: 76260 - DNA, 110 bp, synthetic construct
  source 1..110: mol_type = other DNA
acaaccttatttctcaatttttttttttgtgtgtgtgtgtcagagggaagaaaaagcttctactcttctgatttttgtggtaagttttagctgcttgtctcaggagagaa

SEQ ID NO: 76261 - DNA, 110 bp, synthetic construct
  source 1..110: mol_type = other DNA
ttatctagaagaccagtggggcgaagcaaagctcaactgtaactgcagagaaggagcaatcacttgtatttgccaggaagtggtgatattcagtctctttaatgaatgaa

SEQ ID NO: 76262 - DNA, 110 bp, synthetic construct
  source 1..110: mol_type = other DNA
ctcctcacttgtctgtgtctttggcacatcaagcttcaactcttttacattcattgtgttcaggaaagtgaactgttggagttccctggtggcccagtggttaaggactt

SEQ ID NO: 76263 - DNA, 110 bp, synthetic construct
  source 1..110: mol_type = other DNA
gccaccctcaggacctatgttgcattgtaacatatttgtgtaatgacttattccttttgatctgaaattggcacaccgagtcggccctcagcttgtgtttgttggtagag

SEQ ID NO: 76264 - DNA, 110 bp, synthetic construct
  source 1..110: mol_type = other DNA
tttgatctgaaattggcacaccgagtcggccctcagcttgtgtttgttggtagagttttgctggcacacggctccatccattcattacataccctctctggctgatttca

SEQ ID NO: 76265 - DNA, 110 bp, synthetic construct
  source 1..110: mol_type = other DNA
aacatgtatttcttttctgctgttgaaaaacagcttgtaatttgtcacttatctaaaaacaaacatggatttcatctgcatcagcgattttcatcaggggcaattttata

SEQ ID NO: 76266 - DNA, 110 bp, synthetic construct
  source 1..110: mol_type = other DNA
aaaacaaacatggatttcatctgcatcagcgattttcatcaggggcaattttatacatcctcctccctgtgaaaaggatatttggcaatatctgcagacttttttttcat

SEQ ID NO: 76267 - DNA, 110 bp, synthetic construct
  source 1..110: mol_type = other DNA
tttctttcattctgttggcttttaataagtaaaatcagagccattccaagaatttatccaaaaatgtattgagactaaaatagtacacctgagtatatgtgtcatctggt

SEQ ID NO: 76268 - DNA, 110 bp, synthetic construct
  source 1..110: mol_type = other DNA
atccaaaaatgtattgagactaaaatagtacacctgagtatatgtgtcatctggtggtggtgggcttccggaaatcccactcagaagctcagaagaccattccaaataat

SEQ ID NO: 76269 - DNA, 110 bp, synthetic construct
  source 1..110: mol_type = other DNA
agatatggcatggcttctgatcttgcgcatttgtgaaggtgtgttctggcccagaatgaggtcagtcttggtgcacgttccctgtgagcttgagaagaatgtgaaatcta

SEQ ID NO: 76270 - DNA, 110 bp, synthetic construct
  source 1..110: mol_type = other DNA
atgaggtcagtcttggtgcacgttccctgtgagcttgagaagaatgtgaaatctagagttggatgaagtcctctgtagactacattccaaccatttgctggatgttgtgt

SEQ ID NO: 76271 - DNA, 110 bp, synthetic construct; identical to SEQ ID NO: 76269
  source 1..110: mol_type = other DNA

SEQ ID NO: 76272 - DNA, 110 bp, synthetic construct; identical to SEQ ID NO: 76270
  source 1..110: mol_type = other DNA

SEQ ID NO: 76273 - DNA, 110 bp, synthetic construct
  source 1..110: mol_type = other DNA
ccatacgtcagaagtccaatcccaacgagcctggtttctctgcttcaggatctcaccaggctaaatctagagctgtgttcccattaaagactccaacagagaaagatctg

SEQ ID NO: 76274 - DNA, 110 bp, synthetic construct
  source 1..110: mol_type = other DNA
ccaggctaaatctagagctgtgttcccattaaagactccaacagagaaagatctgctcgccaacacgctcaaggtgttggtatgattcatctccttgcagttgcaggact

SEQ ID NO: 76275 - DNA, 110 bp, synthetic construct
  source 1..110: mol_type = other DNA
ttcaaggatggagacttagacctcacttctcagtgggaggagtgtcacagaattggaggggccattactgaaccccccaccacaagagaatggataaattaatcatggca

SEQ ID NO: 76276 - DNA, 110 bp, synthetic construct
  source 1..110: mol_type = other DNA
cactcgtcagtcttcccgaaagcatgctaaagatactgccaacattattaaaccaacataggagctgagaaaccagctgaacatttctctgataaaaacatcacattttc

SEQ ID NO: 76277 - DNA, 110 bp, synthetic construct
  source 1..110: mol_type = other DNA
acataggagctgagaaaccagctgaacatttctctgataaaaacatcacattttcaaagcaaagagctcacctgctgggggaaagggatgggactctgcttccagaggtc

SEQ ID NO: 76278 - DNA, 110 bp, synthetic construct
  source 1..110: mol_type = other DNA
gctgcccctgctcagaaagtctggctactgaaccacatcagtgctgccaccaggcccactccctcttactgagggaagtgctattcagcttggtgatgctcccctgtcct

SEQ ID NO: 76279 - DNA, 110 bp, synthetic construct
  source 1..110: mol_type = other DNA
ccactccctcttactgagggaagtgctattcagcttggtgatgctcccctgtcctgcatcatgggccaaaagtccaacacagaggagctgtgagcaggtggtaggtagta

SEQ ID NO: 76280 - DNA, 110 bp, synthetic construct
  source 1..110: mol_type = other DNA
acggaaggtaaagtgatgcgtgtgcttctctgctgtagggcctgccttcctttgcagctctgagttagatgaggtcgggactagaatgtcccctgctcttctctttgtgt

SEQ ID NO: 76281 - DNA, 110 bp, synthetic construct
  source 1..110: mol_type = other DNA
ggcagggtgttgaggaagggacccagatggggctgaacaggtggaatccctagtgtggcgggaaatagcatgggacacactcggcatttcttctaccgtgagcaggctgt

SEQ ID NO: 76282 - DNA, 110 bp, synthetic construct
  source 1..110: mol_type = other DNA
gctgatgttggaacctggatctcacttttatctccagaagaattaaaggaagcctcaataagatccatgtgtttcctaacactatgaataatgagatgacactgaagagt

SEQ ID NO: 76283 - DNA, 110 bp, synthetic construct
  source 1..110: mol_type = other DNA
gggaataggagaaggagaaaaagaatagtagatgaaggctgagagtggtggctatctgggatgtcagcggctcacgtgagacacttgtagtctctgctttgtcaactctc

SEQ ID NO: 76284 - DNA, 110 bp, synthetic construct
  source 1..110: mol_type = other DNA
tctcttgcctttaaaaagctgatgctgcccctggaaaaagtgaccacaaatcagtcagtaacaagatgccaagtagtgaagcccacagaaggcactggtcacaaagtcac

SEQ ID NO: 76285 - DNA, 110 bp, synthetic construct
  source 1..110: mol_type = other DNA
aggtctttcattatcagatatcaagatagtttacaaagttgcaataattaagatggtgtagtattggtccaagaacagcaaatcaaccagtggaacggaatacaaactct

SEQ ID NO: 76286 - DNA, 110 bp, synthetic construct
  source 1..110: mol_type = other DNA
acaggacaggcagggtggagctgggctgggaacctagatccttctgagcccggcgcccaagtgcttttacgctgcctgagatgggcgtgtggaggaagggccttcggggc

SEQ ID NO: 76287 - DNA, 110 bp, synthetic construct
  source 1..110: mol_type = other DNA
cccaagtgcttttacgctgcctgagatgggcgtgtggaggaagggccttcggggctcccagggcagctttctgggggctggacacggtctggtgtggctgcagttagtag

SEQ ID NO: 76288 - DNA, 110 bp, synthetic construct
  source 1..110: mol_type = other DNA
ggactggagccagagcaagaaactgaagccgaggtcagatatctggggcagctatggggacccccatgtcacctccatgctccaggagacctggcccttcactgctgcac

SEQ ID NO: 76289 - DNA, 110 bp, synthetic construct
  source 1..110: mol_type = other DNA
gggactcctactctgcaaggatagaccatgtgtccctgaaggagaatggaggtgtcacagacaccatttgtgctttaggtagaagtgatagagctgttggataggcagca

SEQ ID NO: 76290 - DNA, 110 bp, synthetic construct
  source 1..110: mol_type = other DNA
cacagacaccatttgtgctttaggtagaagtgatagagctgttggataggcagcacctacatttctctctctctggaggcagactcttttcattttattttattttttta

SEQ ID NO: 76291 - DNA, 110 bp, synthetic construct
  source 1..110: mol_type = other DNA
aaggagagatctgggagagcagagaggcaggcgaggggattctgaattaattgcacaatattctggagctggggaggggcgataaggagtcactggagaaatgtggcctc

SEQ ID NO: 76292 - DNA, 110 bp, synthetic construct
  source 1..110: mol_type = other DNA
caatattctggagctggggaggggcgataaggagtcactggagaaatgtggcctctggaagaaaagtctgggaaccgaactccactcctttgctgggtcatgttgcctct

SEQ ID NO: 76293 - DNA, 110 bp, synthetic construct
  source 1..110: mol_type = other DNA
tgtcaataattgctaagaaatctaaaaacagtgaccagcacggtgacacagctgtatcaacaactgctaggaagtgcaggagaatgagaggtacaaggaagaaaatgaaa

SEQ ID NO: 76294 - DNA, 110 bp, synthetic construct
  source 1..110: mol_type = other DNA
atctcaaaagtgagtaaacatttatcaaatggtttctgaattaaactccatgtcctggaagctacacaggctatttttcatggctggatcaaggcctgggaattctaatg

SEQ ID NO: 76295 - DNA, 110 bp, synthetic construct
  source 1..110: mol_type = other DNA
ccttcatttccctcacctcacggtttcttcggcccccaaggagtttaatgtgacggagacctagggtccacgggcctttgtgggaggggctaagttcagctgtcagaacc

SEQ ID NO: 76296 - DNA, 110 bp, synthetic construct
  source 1..110: mol_type = other DNA
gagacctagggtccacgggcctttgtgggaggggctaagttcagctgtcagaacctaagagaaaaagctttagatttttttgacgtttgtgtctcctacataattttttt

SEQ ID NO: 76297 - DNA, 110 bp, synthetic construct
  source 1..110: mol_type = other DNA
agagggtacagagcagcagtttctggtaaactcacaaacattcccagctgactcccacctgaggactcttgcccttgctattgcctccacctggaatcttcttcaagacc

SEQ ID NO: 76298 - DNA, 110 bp, synthetic construct
  source 1..110: mol_type = other DNA
tcaaagttcccctctgtgttcagaactacaggagtagtgtgactctccaaacatctaggttctattttatcttctcgaaaaatttcacatctcttgcttttgttagctgc

SEQ ID NO: 76299 - DNA, 110 bp, synthetic construct
  source 1..110: mol_type = other DNA
tttgaaaataaaaaataatgaaaatacggcatatcagaacttgtaagagaagggctaaggatctatcattgtctctgcagcagcttaggtcactgttgaggcacaggttc

SEQ ID NO: 76300 - DNA, 110 bp, synthetic construct; identical to SEQ ID NO: 76299
  source 1..110: mol_type = other DNA

SEQ ID NO: 76301 - DNA, 110 bp, synthetic construct
  source 1..110: mol_type = other DNA
tacactatagctgtagcaacactggatccttaactcacttcactgggccgaatatcgaacccatgcctccacagtgacctgagccactgcagtcaggttcttaacctact

SEQ ID NO: 76302 - DNA, 110 bp, synthetic construct
  source 1..110: mol_type = other DNA
ggccgaatatcgaacccatgcctccacagtgacctgagccactgcagtcaggttcttaacctactttgccatggtgggaaccccttctatagttctaaaacatttctttg

SEQ ID NO: 76303 - DNA, 110 bp, synthetic construct
  source 1..110: mol_type = other DNA
acccccagcatcttgacctctgcagggaccacagtccttaaacatagcatggggccacatgagccctctggtcccctgttgacggtcatatacattcctcacagaaattt

SEQ ID NO: 76304 - DNA, 110 bp, synthetic construct
  source 1..110: mol_type = other DNA
cacatgagccctctggtcccctgttgacggtcatatacattcctcacagaaatttacatcctccttttcctacctcggagtcaacttgggaagcaacaccttttctcaat

SEQ ID NO: 76305 - DNA, 110 bp, synthetic construct
  source 1..110: mol_type = other DNA
tgcattttgatgggatttcaggtttcagcgctataagaattacttctttttgagtagtatagattacaccttgttcttttctagtatccttcaggtagcctagtgcagta

SEQ ID NO: 76306 - DNA, 110 bp, synthetic construct
  source 1..110: mol_type = other DNA
agtatagattacaccttgttcttttctagtatccttcaggtagcctagtgcagtaccagaaaaacagctccatagatgtttgatgaatgaataagtgaataaacagatga

SEQ ID NO: 76307 - DNA, 110 bp, synthetic construct
  source 1..110: mol_type = other DNA
cctgtccgcaagaaaactttaataacgcagccttgctctaatgtcttgtgagaggagaggcaattttacttcttctattaacccaacgtgattacaatggcttatttcat

SEQ ID NO: 76308 - DNA, 110 bp, synthetic construct
  source 1..110: mol_type = other DNA
catggacataagaaaaatatatttctagggatcagaacaataagctatctgacactcaggaagaagtggatgtagattgtggcgatgacacagaaagtcaagattttgag

SEQ ID NO: 76309 - DNA, 110 bp, synthetic construct
  source 1..110: mol_type = other DNA
aactcctacagctacctgtgcctactccatccctatcagtatcaggaactccttaacatgtttttttttttttttttttggtctttttagagctgcacctgtgatcccag

SEQ ID NO: 76310 - DNA, 110 bp, synthetic construct; identical to SEQ ID NO: 76309
  source 1..110: mol_type = other DNA

SEQ ID NO: 76311 - DNA, 110 bp, synthetic construct
  source 1..110: mol_type = other DNA
aaatacgtgctacgtactgccttgtggggctctgccattgttactttcctcctcactctccactacctctttccccctcctgaaaagctccttggggtcatggatcagga

SEQ ID NO: 76312 - DNA, 110 bp, synthetic construct
  source 1..110: mol_type = other DNA
ctctccactacctctttccccctcctgaaaagctccttggggtcatggatcaggatgatcaaaatatcacttctccatggagttcccgtcatggcacagtggttaacaaa

SEQ ID NO: 76313 - DNA, 110 bp, synthetic construct
  source 1..110: mol_type = other DNA
tatgaagaggtgctaatcagctaaatgctattactcctggaagaatagcaataattatggcagctgatgaaagtgagctcatgggttgacatctatcctcatgtaaagat

SEQ ID NO: 76314 - DNA, 110 bp, synthetic construct
  source 1..110: mol_type = other DNA
tatggcagctgatgaaagtgagctcatgggttgacatctatcctcatgtaaagatatgatggccccacaagatagagcctaaaatccaatgggcatgattcataccattc

SEQ ID NO: 76315 - DNA, 110 bp, synthetic construct
  source 1..110: mol_type = other DNA
ttggcatttatatccctgacttggatttaggtcaggtctacttaccagttgcacagaaagaacagaagaggcttacatctatagaaaaggactgaatttcatgaatcctc

SEQ ID NO: 76316 - DNA, 110 bp, synthetic construct
  source 1..110: mol_type = other DNA
catctagctcatgtcagagtgagacccagcccaacccctcatcctagagaagctaagccatggtcaaggccaggtccccctggaacctctcatcactaccctcccttctg

SEQ ID NO: 76317 - DNA, 110 bp, synthetic construct
  source 1..110: mol_type = other DNA
agccatggtcaaggccaggtccccctggaacctctcatcactaccctcccttctggtgaagcaggagaccacagaggtgatccggacagccttccagcaagccagctacc

SEQ ID NO: 76318 - DNA, 110 bp, synthetic construct
  source 1..110: mol_type = other DNA
gcaggacggtaaggggcccaagagaggcagagaccagacccagcctctcgtgctgcctggtcctgcagtggcggcgcgggtcaaactgcggagaaccaggcctctgctgg

SEQ ID NO: 76319 - DNA, 110 bp, synthetic construct
  source 1..110: mol_type = other DNA
cccggggtgagcttttaaagaagatgaacccaatcatactcccatcgctcaggtcctgaggatgaagacagacccgtccctatggcccctagaagccctgtgtcactgaa

SEQ ID NO: 76320 - DNA, 110 bp, synthetic construct
  source 1..110: mol_type = other DNA
ctgaggatgaagacagacccgtccctatggcccctagaagccctgtgtcactgaagccctgcccacctccctcccatcccctctcacctcccggctcgctcccctgagct

SEQ ID NO: 76321 - DNA, 110 bp, synthetic construct
  source 1..110: mol_type = other DNA
cttcctctctctgggccctgggctcacctgccactgagacccccattccctcccatctgtgttatgcaggcttggtttgaatgcacagctttgcagctggaaaagctaga

SEQ ID NO: 76322 - DNA, 110 bp, synthetic construct
  source 1..110: mol_type = other DNA
tctgtgttatgcaggcttggtttgaatgcacagctttgcagctggaaaagctagaaaacaccgtctagagactctctgaaggacgggggccctcctgtcatcatcccagg

SEQ ID NO: 76323 - DNA, 110 bp, synthetic construct
  source 1..110: mol_type = other DNA
aacaaagaaatgacccataaaaaggagcttgttttcctttgtgataacaaacgaagtccaggcaggtcaaacacacacagggctgcccgatttgctgttataagcagggc

SEQ ID NO: 76324 - DNA, 110 bp, synthetic construct
  source 1..110: mol_type = other DNA
ctctctgatgtcagctttctcatcttagagatggaactgttgacccctccctccgagagctggcgtgaggctcaccgagatgacataagtgacacactcagatggggcct

SEQ ID NO: 76325 - DNA, 110 bp, synthetic construct
  source 1..110: mol_type = other DNA
agagctggcgtgaggctcaccgagatgacataagtgacacactcagatggggcctggccttggtggttgcctcttgggccacacctcccctcagattccttggtcatggc

SEQ ID NO: 76326 - DNA, 110 bp, synthetic construct; identical to SEQ ID NO: 76324
  source 1..110: mol_type = other DNA

SEQ ID NO: 76327 - DNA, 110 bp, synthetic construct; identical to SEQ ID NO: 76325
  source 1..110: mol_type = other DNA

SEQ ID NO: 76328 - DNA, 110 bp, synthetic construct
  source 1..110: mol_type = other DNA
cctggcccagatactccggagctgcaaagcagccaaaaaaaacaaaaacaaaacacccgcatagaatacaggattcccttgtggagcagtagttggagttggagttccca

SEQ ID NO: 76329 - DNA, 110 bp, synthetic construct
  source 1..110: mol_type = other DNA
accctcagtggagaactactagcatactagtagcgtactagcaaacgagcatacacgggcctgggctctggtaacatgtgactgtcatttatcagctctgtggcttcggg

SEQ ID NO: 76330 - DNA, 110 bp, synthetic construct
  source 1..110: mol_type = other DNA
cgggcctgggctctggtaacatgtgactgtcatttatcagctctgtggcttcgggacagttagttgatcttcgaggcctccgtagctccatctgcaaaggaaggatatga

SEQ ID NO: 76331 - DNA, 110 bp, synthetic construct
  source 1..110: mol_type = other DNA
ggatgctaaagtactcttcacagctagccaggaaaggtcaccaaataaacactttgacgtctgctaagaagggagattagcgggagccttgactctgtgttcgcccagat

SEQ ID NO: 76332 - DNA, 110 bp, synthetic construct
  source 1..110: mol_type = other DNA
acacggtaacagagacagagaactaggccaatacagctgggcttctattactacgttagaaaagcctttctctgagtgctcgtatttgtcacctcgtgtaccctgcttca

SEQ ID NO: 76333 - DNA, 110 bp, synthetic construct
  source 1..110: mol_type = other DNA
ccatcctccgtatcttcagttcctctgaatctacggttctgcatctaagggttaaactaaccacacacactatagttctctaatattgactactgaaaaaaacccatgta

SEQ ID NO: 76334 - DNA, 110 bp, synthetic construct
  source 1..110: mol_type = other DNA
actaaccacacacactatagttctctaatattgactactgaaaaaaacccatgtacaagtggacctgcacaatacaaacccatatcttctaaaagtcacctacaggagtt

SEQ ID NO: 76335 - DNA, 110 bp, synthetic construct
  source 1..110: mol_type = other DNA
accccacccctcatggagcggcatggagagcttctacttccaacagccctttgaagaatgaaatgcctgctctccttcctgtaatgccttgccaacagatgggaccccgt

SEQ ID NO: 76336 - DNA, 110 bp, synthetic construct
  source 1..110: mol_type = other DNA
tcctccatctcaggcagtggacactcgagtactacaggcacagaagaagagcaagaaggtaagctttgctgaagctcagtgcacattttcagaatcataaactctgcatt

SEQ ID NO: 76337 - DNA, 110 bp, synthetic construct
  source 1..110: mol_type = other DNA
gaactcttcatcttcctccttcactgaagctaaaaggagagaataaataacagctgggagaaaagatcaatgaaggccttgcttgcaataacagatagaaagtacctggc

SEQ ID NO: 76338 - DNA, 110 bp, synthetic construct
  source 1..110: mol_type = other DNA
gggagaaaagatcaatgaaggccttgcttgcaataacagatagaaagtacctggcaatgggaaaccataaatgctatagaacctcattcttcatctttgaactaaaggtc

SEQ ID NO: 76339 - DNA, 110 bp, synthetic construct
  source 1..110: mol_type = other DNA
tgccatataagcctcattattaatgggtgcacaaaagggggacagggcccactataaaagcgtcagtctcagtgtgctcacaacaagctctggttctaccactttgcaat

SEQ ID NO: 76340 - DNA, 110 bp, synthetic construct
  source 1..110: mol_type = other DNA
aaaagcgtcagtctcagtgtgctcacaacaagctctggttctaccactttgcaatctgggaacattcaacaggtgactgttgcccacaaatggaggcagggctgaaatat

SEQ ID NO: 76341 - DNA, 110 bp, synthetic construct
  source 1..110: mol_type = other DNA
cacagaacttcatccgctttcaagacttcaccttctttgacaccccagccattttcacatgctcttttctctcgcatggtagtaactcagatgttggaccccactgcttc

SEQ ID NO: 76342 - DNA, 110 bp, synthetic construct
  source 1..110: mol_type = other DNA
cacatgctcttttctctcgcatggtagtaactcagatgttggaccccactgcttcatttttctctcatttttaaaagttttattgagctgtagttgatgtcaaatgttgt

SEQ ID NO: 76343 - DNA, 110 bp, synthetic construct
  source 1..110: mol_type = other DNA
tgacttccctagtccctgtgtaagaagggcttattttcaccccgcacacatgcaccacacatatacacccatgtctagcagacggtattaaatgaataattgtataacga

SEQ ID NO: 76344 - DNA, 110 bp, synthetic construct
  source 1..110: mol_type = other DNA
cacacatatacacccatgtctagcagacggtattaaatgaataattgtataacgagctatttatctccccaagctcactggaggtacttcagggaagagcttttgctctt

SEQ ID NO: 76345 - DNA, 110 bp, synthetic construct
  source 1..110: mol_type = other DNA
ctaggcaaattgtttatcataataagagcttgtcgttaagtatacctactgtgaactcctttacctttattaaaatctaatatttcccaaacgtttcgggtaattgagat

SEQ ID NO: 76346 - DNA, 110 bp, synthetic construct
  source 1..110: mol_type = other DNA
atctcatagattcactatgtagtaaacaactggtgtggtacagtgggatcattcttgatcccattactatatgttacaatccttttgagctcaagggcatgaacataaaa

SEQ ID NO: 76347 - DNA, 110 bp, synthetic construct
  source 1..110: mol_type = other DNA
tgatcccattactatatgttacaatccttttgagctcaagggcatgaacataaaactagtatacggaagtaccttcctagtttgtaagaacatgaatcaggtatgtgcct

SEQ ID NO: 76348 - DNA, 110 bp, synthetic construct
  source 1..110: mol_type = other DNA
cacccaaacttggtgtcctggcttcttcctcacctggaagaatacggggcccatggcagccgtttgtctcatgccaggcatgtgcagaaacgggtctctctactgcagct

SEQ ID NO: 76349 - DNA, 110 bp, synthetic construct
  source 1..110: mol_type = other DNA
gcagccgtttgtctcatgccaggcatgtgcagaaacgggtctctctactgcagctggcttagggggaagtgtagaggacagaaagcagatgtctttatcttcacattaca

SEQ ID NO: 76350 - DNA, 110 bp, synthetic construct
  source 1..110: mol_type = other DNA
ttacagttgatacaactgtgaaactaattccaatgtgtgggctttttctcacaccaagcaattctctagcactagctcagtgtcctaaaattcaactgaatcctgacaca

SEQ ID NO: 76351 - DNA, 110 bp, synthetic construct
  source 1..110: mol_type = other DNA
cattagaagaaaaaagcacgcttaatttgggagaagcacactgatacagcctttccctttaaaatcaccttccctcttcaactctaccatactgttgctttaccctcttc

SEQ ID NO: 76352 - DNA, 110 bp, synthetic construct
  source 1..110: mol_type = other DNA
cctttaaaatcaccttccctcttcaactctaccatactgttgctttaccctcttcaaggcacttatcaatatctggtattatcccatgtgtgtatatctatctatattta

SEQ ID NO: 76353 - DNA, 110 bp, synthetic construct
  source 1..110: mol_type = other DNA
agctgttcttttgcctcatagccttccctggtggcttttccagctctcaaaccaatgggccatcatgtctgtgaatgatctcctcttctatcaacgcagttggaactccc

SEQ ID NO: 76354 - DNA, 110 bp, synthetic construct
  source 1..110: mol_type = other DNA
tgggccatcatgtctgtgaatgatctcctcttctatcaacgcagttggaactcccactttaagtgtgtcctgtataattttaaaagcagtgcctctttcccttctgtagt

SEQ ID NO: 76355 - DNA, 110 bp, synthetic construct
  source 1..110: mol_type = other DNA
gcagctttccataggtcatcattacatagtcaaatttacactggaataattaagggaagctttgaaaaactaaaaagcaataatattgaaagtgcaattcatggactatg

SEQ ID NO: 76356 - DNA, 110 bp, synthetic construct
  source 1..110: mol_type = other DNA
gagggtgattactatttagtggactacaggtaagcaacaaatgtacttaaaacatcagaggaaggagaagggactggtttgttgttctttaagtggaagagagagttatt

SEQ ID NO: 76357 - DNA, 110 bp, synthetic construct
  source 1..110: mol_type = other DNA
cagaggaaggagaagggactggtttgttgttctttaagtggaagagagagttattaatatgtagcgtctaatggtgattctaatactctgtatttaaagagtccgaacag

SEQ ID NO: 76358 - DNA, 110 bp, synthetic construct
  source 1..110: mol_type = other DNA
gcaagtccatagtcacagtgcatcttagagagggatttggtggagggatctttcacgtgaataatggtggcaatcaaatcaatgggccttgagagtgctgttggatgcag

SEQ ID NO: 76359 - DNA, 110 bp, synthetic construct
  source 1..110: mol_type = other DNA
cgtgaataatggtggcaatcaaatcaatgggccttgagagtgctgttggatgcagctgctcaatgggagcctctccctgagaacctccataaacacttccaagttatcat

SEQ ID NO: 76360 - DNA, 110 bp, synthetic construct
  source 1..110: mol_type = other DNA
taaggcactgcttaaaaaatacaaatatgtaaatatcaccatattctgaatcagctgttctgggatgagggaaaggcattatcgtcatggagggagaaattgtactctat

SEQ ID NO: 76361 - DNA, 110 bp, synthetic construct
  source 1..110: mol_type = other DNA
tgttctgggatgagggaaaggcattatcgtcatggagggagaaattgtactctatccttttaggttcctggctagattaagaattgaattggcatagagttcctgtcatg

SEQ ID NO: 76362 - DNA, 110 bp, synthetic construct; identical to SEQ ID NO: 76360
  source 1..110: mol_type = other DNA

SEQ ID NO: 76363 - DNA, 110 bp, synthetic construct; identical to SEQ ID NO: 76361
  source 1..110: mol_type = other DNA

SEQ ID NO: 76364 - DNA, 110 bp, synthetic construct
  source 1..110: mol_type = other DNA
aaaagaaaatgtacactatatggaataataaatactcaacatgtgttttctctcttctttggaaaacccaactaatatccaccattcgtaagaaactaaacatgctagtg

SEQ ID NO: 76365 - DNA, 110 bp, synthetic construct
  source 1..110: mol_type = other DNA
tctttggaaaacccaactaatatccaccattcgtaagaaactaaacatgctagtggagttggtaacagtgtgaagtctaagaagtgtgtgtgtgtgtgtgtgtgtgtgtg

SEQ ID NO: 76366 - DNA, 110 bp, synthetic construct
  source 1..110: mol_type = other DNA
gaaaacattggcttccagaccttaagccacctttgtttcagctagctgcatgaatctaaaacagcgttgcttttcatactaagctgtaggtccccttacttcctcatcaa

SEQ ID NO: 76367 - DNA, 110 bp, synthetic construct
  source 1..110: mol_type = other DNA
tctgtcagatcattcgcaccctattcccagaggtcatctgcaaggccaaagtgccaacatttgcctgggtctatgatccagtccctcagctatcaatgacatgcatctgg

SEQ ID NO: 76368 - DNA, 110 bp, synthetic construct
  source 1..110: mol_type = other DNA
agcatctggaagaggaggcccatctcactgggccagactcccatgttttaggctcataaaagctgatagacagagtgccaacctcttcataaccattcagaagcactaca

SEQ ID NO: 76369 - DNA, 110 bp, synthetic construct
  source 1..110: mol_type = other DNA
ataaaagctgatagacagagtgccaacctcttcataaccattcagaagcactacagccacataaaccaatgctttcctctgcaagaccagtctgttctgtccccattctc

SEQ ID NO: 76370 - DNA, 110 bp, synthetic construct
  source 1..110: mol_type = other DNA
agccaggaatgtaaaaccgctcttcaggggaaggaggagtgagggcagttcacggagccaggggagagacaggaggccaagcctggaggagcagggcgggattaggaagc

SEQ ID NO: 76371 - DNA, 110 bp, synthetic construct
  source 1..110: mol_type = other DNA
tggccctgcccacgaagcctgctcatggctttggcagggagccaacgcagaggagtttctacggggctgcctcgagggagtgcagtttttaaatcctcatgtgagcaggg

SEQ ID NO: 76372 - DNA, 110 bp, synthetic construct
  source 1..110: mol_type = other DNA
tttctacggggctgcctcgagggagtgcagtttttaaatcctcatgtgagcagggatcctagtcacttggaagatataacacagtgagaaatgggaacagcctgtactct

SEQ ID NO: 76373 - DNA, 110 bp, synthetic construct
  source 1..110: mol_type = other DNA
tcccgaggcccaaagcaacaggtttacacagcacagggtggaccagaacttgagctcaaacgccagcctccttgcacccactgccttcttttgttttcacaagaccttgt

SEQ ID NO: 76374 - DNA, 110 bp, synthetic construct
  source 1..110: mol_type = other DNA
tcaaacgccagcctccttgcacccactgccttcttttgttttcacaagaccttgtgtggtcgattttagccccaatttacagatgagacccagagagttaagcccagggg

SEQ ID NO: 76375 - DNA, 110 bp, synthetic construct
  source 1..110: mol_type = other DNA
gatgctttctttcccagcatcttgtcacatcattcttgattttctacccttcttcacagtcattgatttcacaactgcaaacgcttccactaagaaagagtcccatcata

SEQ ID NO: 76376 - DNA, 110 bp, synthetic construct
  source 1..110: mol_type = other DNA
acagtcattgatttcacaactgcaaacgcttccactaagaaagagtcccatcataatgttccttctttgctgcccttgggcagcttcttgtttttctctctgaagctaat

SEQ ID NO: 76377 - DNA, 110 bp, synthetic construct
  source 1..110: mol_type = other DNA
ccccagaggaaactaaggagtgtgccctgtaaaaaaagggggccaggcagaggtagtccaggatagtttattgcgttggtggtcactggaggttcccctcactcccctcc

SEQ ID NO: 76378 - DNA, 110 bp, synthetic construct
  source 1..110: mol_type = other DNA
gtccaggatagtttattgcgttggtggtcactggaggttcccctcactcccctcctctcctttgccctcttccaaccttaccattcctccagtctctcattcttcttccc

SEQ ID NO: 76379 - DNA, 110 bp, synthetic construct
  source 1..110: mol_type = other DNA
cagggttattatcgtaagtgtttaataagaacatacaaaagaaagttttacatgaagttacgtctctatctgaggaccagaaggggaaagttgaggcctaaaaaattact

SEQ ID NO: 76380 - DNA, 110 bp, synthetic construct
  source 1..110: mol_type = other DNA
ctttcatatgccgtgagtgaggacctaaaaagcaaaaaaaaaaaaaaaaaaaaaaaaaaaaaaaaaaaaaatcacagccagcaggatagcgtagggggtcatgtctgtgt

SEQ ID NO: 76381 - DNA, 110 bp, synthetic construct
  source 1..110: mol_type = other DNA
aaaaaaaaaaaaaaaatcacagccagcaggatagcgtagggggtcatgtctgtgtgacctcaaaatttcagctgccctctaagtgtgtgccagtcggcttcccagaaggg

SEQ ID NO: 76382 - DNA, 110 bp, synthetic construct
  source 1..110: mol_type = other DNA
ttattatccaaagatgaaattggtttcttggttagggagtgagtttcctattacttaaggcatagaagcagaagttggccaccacttggtagaggtattctcagaggatt

SEQ ID NO: 76383 - DNA, 110 bp, synthetic construct
  source 1..110: mol_type = other DNA
taaggcatagaagcagaagttggccaccacttggtagaggtattctcagaggatttttgaacatcactaggtaaaataaactctctggggcctgcagcctcaggcagccc

SEQ ID NO: 76384 - DNA, 110 bp, synthetic construct
  source 1..110: mol_type = other DNA
ctcctactttgagcagtcctttcatgaagtgtactcatcctaaatcatggatctgctacttttttgatgttataaaaagatgatgattgttacttgtaacttctgcttgc

SEQ ID NO: 76385 - DNA, 110 bp, synthetic construct
  source 1..110: mol_type = other DNA
ctacttttttgatgttataaaaagatgatgattgttacttgtaacttctgcttgcttgatgaaatggtaaagtggaatcttccttggtaatacagtatactgcagtgatt

SEQ ID NO: 76386 - DNA, 110 bp, synthetic construct
  source 1..110: mol_type = other DNA
gggagcccttcccaatgctctcagttctggggtccctccatgagccccttcattgcgtctgtgagagcttactgcaccctctggagatggcccccagcctcacctgctct

SEQ ID NO: 76387 - DNA, 110 bp, synthetic construct
  source 1..110: mol_type = other DNA
cctgacctctggcccttgttactggcagagactaccttgcctcagaggtgacatcacttgattctggcctgggtcaccatagcagggatggagcaagagtctgtgggtcc

SEQ ID NO: 76388 - DNA, 110 bp, synthetic construct
  source 1..110: mol_type = other DNA
acttgattctggcctgggtcaccatagcagggatggagcaagagtctgtgggtcccagcagcttggctcagggtggcaggagatcaccgggaaggttttgtgaggaaacc

SEQ ID NO: 76389 - DNA, 110 bp, synthetic construct
  source 1..110: mol_type = other DNA
gagtcttagtgagaaggtggtcatatgcaagccaggaagagagctccccataggaactacatgggccagaacctggttgtggacttcctgcctctagcactgtgagaaaa

SEQ ID NO: 76390 - DNA, 110 bp, synthetic construct
  source 1..110: mol_type = other DNA
actacatgggccagaacctggttgtggacttcctgcctctagcactgtgagaaaataaactcctgttgtttaacttatccagtctatgtttagctaaggcagtacgagcc

SEQ ID NO: 76391 - DNA, 110 bp, synthetic construct
  source 1..110: mol_type = other DNA
gcacatgcacccttttaactggccagggccatgaattcttctgtaaaagacctgagcactgccccagtcaagctgaattaaatggaaaatcaaggctgtgattccaagac

SEQ ID NO: 76392 - DNA, 110 bp, synthetic construct
  source 1..110: mol_type = other DNA
gtaggatataaaatcaacatacgaaaatcagttttgggtctatacagttaacagtagattatgtgaaagaaaaataaggtagagaaagacaaatactacatggtatcact

SEQ ID NO: 76393 - DNA, 110 bp, synthetic construct
  source 1..110: mol_type = other DNA
gtgttgttttaagccaccaagcttgtggcagtttgttacatcagccatagaaaatgaatataaggactctacattccttttggtatttggcttaaatatggccctattta

SEQ ID NO: 76394 - DNA, 110 bp, synthetic construct
  source 1..110: mol_type = other DNA
gaatataaggactctacattccttttggtatttggcttaaatatggccctatttatttattttttgactcaaatatgagaactttacttctccgaccataccaaaaattc

SEQ ID NO: 76395 - DNA, 110 bp, synthetic construct
  source 1..110: mol_type = other DNA
ctgctggcaaagtgtctgcctcttcttccagacagtcgttcagttatgagtcatttctagcccatcccggagactcatccagtgagtactgagcatctgctctaggtcag

SEQ ID NO: 76396 - DNA, 110 bp, synthetic construct
  source 1..110: mol_type = other DNA
tctagcccatcccggagactcatccagtgagtactgagcatctgctctaggtcaggggacaagtttgcattaaattctggtaatgttagtctgaaaattacatggtcctg

SEQ ID NO: 76397 - DNA, 110 bp, synthetic construct
  source 1..110: mol_type = other DNA
cattagaagtgatgtaacaagcctgctttggcctagttttcttaaagctggcagccccctggctctcccacacccttctttctgaatctgcaagtgatggctactgccat

SEQ ID NO: 76398 - DNA, 110 bp, synthetic construct
  source 1..110: mol_type = other DNA
aagaagaagcctgtgtgtttggagtggagcataggagagctccatgtaggatgaccctggagaggtggctattaaaaaatttacttgggaaggatctgggggtccccatc

SEQ ID NO: 76399 - DNA, 110 bp, synthetic construct
  source 1..110: mol_type = other DNA
cctggagaggtggctattaaaaaatttacttgggaaggatctgggggtccccatctggtcaggcattggtcctttggtttctggattgtgggaaattctgtatagggtcc

SEQ ID NO: 76400 - DNA, 110 bp, synthetic construct
  source 1..110: mol_type = other DNA
gtttggactttgaccccaaattctaatgaaactacagtgtgttggactggaacactctcatgatcaagtcaatccttcatcttcacaaagaaattaaaataccaaaacct

SEQ ID NO: 76401 - DNA, 110 bp, synthetic construct
  source 1..110: mol_type = other DNA
aaggagaaaatgattctcacatttgagaataagaaagtctatatggagatggcatttccatgggatcataaaagacaataagatttgatcaggtgaagtcaaggcaaaca

SEQ ID NO: 76402 - DNA, 110 bp, synthetic construct
  source 1..110: mol_type = other DNA
ttccatgggatcataaaagacaataagatttgatcaggtgaagtcaaggcaaacatccagaagaggaaaatgtaattaacaaagactgtatgaggtcatggggagcagtg

SEQ ID NO: 76403 - DNA, 110 bp, synthetic construct
  source 1..110: mol_type = other DNA
ttttctagatgatagaggggcaaacacttgttgaggacacagtgggatgttcttctcagagaaaaccaggaagaaatacgagtaggaaagaggcatagggaaggtcctca

SEQ ID NO: 76404 - DNA, 110 bp, synthetic construct
  source 1..110: mol_type = other DNA
tatcagctggttctggtccatcagctgttgtttgctgaccatcacctgctacatgtcctaagccgaagaaaacaaagcatgctggtaaagtttaaggactgaaggattgc

SEQ ID NO: 76405 - DNA, 110 bp, synthetic construct
  source 1..110: mol_type = other DNA
gcagaactgcagtgtagggtgggtgttaagaacacaggcatctgtgtctgagctttgccgcaggtgtatccttgaggcacttcggcctcagtttttgcacctagaaaatg

SEQ ID NO: 76406 - DNA, 110 bp, synthetic construct
  source 1..110: mol_type = other DNA
tgccgcaggtgtatccttgaggcacttcggcctcagtttttgcacctagaaaatgggactaataatggcatctaccttaaatgagaactacaggtgaaatgcgcagcctc

SEQ ID NO: 76407 - DNA, 110 bp, synthetic construct
  source 1..110: mol_type = other DNA
aaccactgagccatgacgggaactcctcattttttttttttttttagaatccatatataagtgatatcatatgggaagtcagccagttttagtctgttttcctgggtgag

SEQ ID NO: 76408 - DNA, 110 bp, synthetic construct
  source 1..110: mol_type = other DNA
agcccgcagcttgggttgcatctgtgccccctctcgtgccacagaatcaggtggttacgtaggcatttctgatgttgtctcatgaaacccgagcgctgaatcctgaatga

SEQ ID NO: 76409 - DNA, 110 bp, synthetic construct
  source 1..110: mol_type = other DNA
tacgtaggcatttctgatgttgtctcatgaaacccgagcgctgaatcctgaatgatggccatgttccacttggtgactagaaggaatgcgaaatggggcgattctggcca

SEQ ID NO: 76410 - DNA, 110 bp, synthetic construct
  source 1..110: mol_type = other DNA
tggcactgttttattcttttctaacccagtatcatgtcttatgaagtcatggtaccacaatttatttcaccattctcctgttaggaaatactggtgttcttctacgtttt

SEQ ID NO: 76411 - DNA, 110 bp, synthetic construct
  source 1..110: mol_type = other DNA
cacaatttatttcaccattctcctgttaggaaatactggtgttcttctacgttttcccttcacaaacagggttgcagtgacaatcttgtatccatctccttgtgcacatg

SEQ ID NO: 76412 - DNA, 110 bp, synthetic construct
  source 1..110: mol_type = other DNA
aggctggggagtagcaggtggggaaccccagaacgaagcccggtttgatagacccaggcttgtgagagggacagagggacaaggggccaggaagccaggggcccagggac

SEQ ID NO: 76413 - DNA, 110 bp, synthetic construct
  source 1..110: mol_type = other DNA
aggcttgtgagagggacagagggacaaggggccaggaagccaggggcccagggacagacccagtcagatttcaggtctcaggcccctgtagtctccaaaccagatggacc

SEQ ID NO: 76414 - DNA, 110 bp, synthetic construct
  source 1..110: mol_type = other DNA
tattgctggtgatgagccccactggaacagggcttaaccactgcctacaacccggcttttacagcccttgtcagagctggtgaggacaatatcaaacaggaaattatgag

SEQ ID NO: 76415 - DNA, 110 bp, synthetic construct
  source 1..110: mol_type = other DNA
ctcccttgaactttccatggtttcttttcagaaagcgaggtgtttttccttctccaccctctctatcagctctgacccaaagattctcctgcttttggagtcgtagagga

SEQ ID NO: 76416 - DNA, 110 bp, synthetic construct
  source 1..110: mol_type = other DNA
accctctctatcagctctgacccaaagattctcctgcttttggagtcgtagaggaacctcagaggttgctcctgacaacctgtcctcctcatcaaagtcattaagcgtta

SEQ ID NO: 76417 - DNA, 110 bp, synthetic construct
  source 1..110: mol_type = other DNA
tctaaaacttgatcacagccaattaaactccttgtgtttgaacttctttaccatgaaaaaaaaaaagtcttatcctcccttcattattttaaatttccccaatccctgct

SEQ ID NO: 76418 - DNA, 110 bp, synthetic construct
  source 1..110: mol_type = other DNA
aaaaaaaaaaagtcttatcctcccttcattattttaaatttccccaatccctgctttacaaatcgtacaaactgacctctccattcctttgcaaaatcacataaaaacca

SEQ ID NO: 76419 - DNA, 110 bp, synthetic construct
  source 1..110: mol_type = other DNA
accactgtgccacaatgggaactctggaaattgcatctttaactagattatgaacctttcttcttttcctctgagctaataatgatggagtccagttctttatctgatat

SEQ ID NO: 76420 - DNA, 110 bp, synthetic construct; identical to SEQ ID NO: 76419
  source 1..110: mol_type = other DNA

SEQ ID NO: 76421 - DNA, 110 bp, synthetic construct
  source 1..110: mol_type = other DNA
taggtaatccataaaaaattttgaatgtgatactttatagtcttttttcctcactaagtctttgaaatctggtgcatattttggactgaaaacccacctctacttggacc

SEQ ID NO: 76422 - DNA, 110 bp, synthetic construct
  source 1..110: mol_type = other DNA
aagtctttgaaatctggtgcatattttggactgaaaacccacctctacttggaccagccacatttcagatgtttaatagtgacttgtgcccagaggtttctgtacaggac

SEQ ID NO: 76423 - DNA, 110 bp, synthetic construct
  source 1..110: mol_type = other DNA
tgtcccttctaatgagccggtttaaaatagcttctcctgtgtggcaaaatgtctcctggtcctgggactggtgatggggccacgatttaatctgtttaggaagcagttcc

SEQ ID NO: 76424 - DNA, 110 bp, synthetic construct
  source 1..110: mol_type = other DNA
ctggtcctgggactggtgatggggccacgatttaatctgtttaggaagcagttcctcctttgctgtttggtcagggaaggtgatacctgagtccaaagccgagccattaa

SEQ ID NO: 76425 - DNA, 110 bp, synthetic construct
  source 1..110: mol_type = other DNA
gtcttcacacaggccttctccaataccctcatgtccaggtgggcatccctcccccagccgttgtcttttatttcactgcattttgcatccttataccatctgaaaggatt

SEQ ID NO: 76426 - DNA, 110 bp, synthetic construct
  source 1..110: mol_type = other DNA
tgcctgatcccaggtcccaaagccagctccattaaacctaggtgccaatcacctgtgggccggctgcaggagacttctccctctggggaccctgcccccacctgcccttg

SEQ ID NO: 76427 - DNA, 110 bp, synthetic construct
  source 1..110: mol_type = other DNA
gtactggccttcttttgatttcttaaaacagcccaagctttcggccatggctcttttgtccttggctgttccttcttcctggaacgttgacctttcacctcattgacttg

SEQ ID NO: 76428 - DNA, 110 bp, synthetic construct
  source 1..110: mol_type = other DNA
ttaacatgtggaaagggctttgaactgtgcctggcaccgcagtaaatagtatggaagtgttaactattattatttacaagggtatttttagtagagttgtgtaatgaaaa

SEQ ID NO: 76429 - DNA, 110 bp, synthetic construct
  source 1..110: mol_type = other DNA
ctcagtagtagattgggctttaggcagtttcagagaacgaaggaaggactgagacctgaaatatccattccttggtttcctgttttttaaaaaaatcaaaagacaggagt

SEQ ID NO: 76430 - DNA, 110 bp, synthetic construct
  source 1..110: mol_type = other DNA
ctgaaatatccattccttggtttcctgttttttaaaaaaatcaaaagacaggagttccctggtggcctggtgattaaggatcaggcattgtcactgctgtggatcaggtg

SEQ ID NO: 76431 - DNA, 110 bp, synthetic construct
  source 1..110: mol_type = other DNA
ggccaaccccagatttgtttgtcacccttcggaagtggagaagtgctactttaattgcttttattcctcatttcccaaagcagcctgttagctcctggtctctctccctt

SEQ ID NO: 76432 - DNA, 110 bp, synthetic construct
  source 1..110: mol_type = other DNA
tgcttttattcctcatttcccaaagcagcctgttagctcctggtctctctccctttgtcgagttaattacttttttttaatgataaaacatagctttatcattttttaaa

SEQ ID NO: 76433 - DNA, 110 bp, synthetic construct
  source 1..110: mol_type = other DNA
acagattacaggtgcagtcctataggactgccctccccaccccacttcagatgccagtcataaactcaagctatcacctgtgcttctgaactgctggctatagactggag

SEQ ID NO: 76434 - DNA, 110 bp, synthetic construct
  source 1..110: mol_type = other DNA
agtcataaactcaagctatcacctgtgcttctgaactgctggctatagactggagattccaacaacccccaccttgcatgggattcatttgctagagtggctcacagcac

SEQ ID NO: 76435 - DNA, 110 bp, synthetic construct
  source 1..110: mol_type = other DNA
tctttcctcatggggatcatgacaacaatgacctcctggggccatgatgaggattccgggggacactgcacataaagcatttaggatcatgctttgccacccaagaagcc

SEQ ID NO: 76436 - DNA, 110 bp, synthetic construct
  source 1..110: mol_type = other DNA
ccgggggacactgcacataaagcatttaggatcatgctttgccacccaagaagccctacatgtaggaagatcacatgcatgttcatataatttttaagtcaaattgatga

SEQ ID NO: 76437 - DNA, 110 bp, synthetic construct
  source 1..110: mol_type = other DNA
ctttatccgcttggctggcagctctgtgctcttggtgcccggctatgagcagacgcagacgttccatcagcacataaagctggcacatcccctgcccatggcattgccct

SEQ ID NO: 76438 - DNA, 110 bp, synthetic construct
  source 1..110: mol_type = other DNA
cttgagttcagatggactctttagctgtgtggctttgggaaacttgtttaaccgctctgagtcttggtttctgtaaatgtaaagtgtgggtagcaatcctttccctttga

SEQ ID NO: 76439 - DNA, 110 bp, synthetic construct
  source 1..110: mol_type = other DNA
gagtgagattccctcatcctttggcttttggttgggtttagccaatgggaggcacaagctgatctgcccccaagaggtgccacgattgactgcctcctctgcctccccca

SEQ ID NO: 76440 - DNA, 110 bp, synthetic construct
  source 1..110: mol_type = other DNA
aagctgatctgcccccaagaggtgccacgattgactgcctcctctgcctcccccaccctccaaggtcacagctcctgccagtggccctctctatacagccatctgtctcc

SEQ ID NO: 76441 - DNA, 110 bp, synthetic construct
  source 1..110: mol_type = other DNA
atccaccccaaagctgcatgtccttccaggcccagccccaggaggccgaggctgtgaagcctttgcccacgtgtctcctggggacctgcttttccatgagctcctatcct

SEQ ID NO: 76442 - DNA, 110 bp, synthetic construct
  source 1..110: mol_type = other DNA
gaagcctttgcccacgtgtctcctggggacctgcttttccatgagctcctatcctgccctttggagtcactgaaggaccacctgtcagcttgccccttttctttaactgt

SEQ ID NO: 76443 - DNA, 110 bp, synthetic construct
  source 1..110: mol_type = other DNA
gcccggagctgtttaacggttcgagttgttaagactgcatcctccacctaggaggttgctgcagatctgggacaaagcctggccctccaagcttggtggccatgaggaat

SEQ ID NO: 76444 - DNA, 110 bp, synthetic construct
  source 1..110: mol_type = other DNA
ttgctgcagatctgggacaaagcctggccctccaagcttggtggccatgaggaattttatcttggtttacttcggacctagtgggctggtgttcagtgtgggcccaggag

SEQ ID NO: 76445 - DNA, 110 bp, synthetic construct; identical to SEQ ID NO: 76443
  source 1..110: mol_type = other DNA

SEQ ID NO: 76446 - DNA, 110 bp, synthetic construct; identical to SEQ ID NO: 76444
  source 1..110: mol_type = other DNA

SEQ ID NO: 76447 - DNA, 110 bp, synthetic construct
  source 1..110: mol_type = other DNA
gtagcacagtggtaatgaacccgatgagtatccaggaggctgcaggttcaatccctggctttgctatgtgggttaaggatgcggcattactgtgagctgtgatgcaggtt

SEQ ID NO: 76448 - DNA, 110 bp, synthetic construct
  source 1..110: mol_type = other DNA
gaggctgcaggttcaatccctggctttgctatgtgggttaaggatgcggcattactgtgagctgtgatgcaggttatagaaggggctaatatctggtgttgctgtggctc

SEQ ID NO: 76449 - DNA, 110 bp, synthetic construct
  source 1..110: mol_type = other DNA
acgacaggggctctgattgcagctgaggctcggattcaattcctggcctggaatttccatctgctgcaggaaaaacttccacttctatgctgccataaaattttttttta

SEQ ID NO: 76450 - DNA, 110 bp, synthetic construct
  source 1..110: mol_type = other DNA
ggcctcactcggtgggttaagtatctggcgttgctgtgagctgcggtgtaggtctcatttgtggtgtagactgggaactcctatgtgccgcaggtgcggccctaaaatgc

SEQ ID NO: 76451 - DNA, 110 bp, synthetic construct
  source 1..110: mol_type = other DNA
tatcacttgtttaaatattcaggttctttggatgccttatgttgccttattcccctagtgtaaagttgtcattatcctcagtgttccccatcatcttcgttctgggttaa

SEQ ID NO: 76452 - DNA, 110 bp, synthetic construct
  source 1..110: mol_type = other DNA
tgctcactggatgcatttaccagtggaagagtatgtgccactgctccagggactaccccccatccttccacatccagatcttcagaccattccctcctagccaccaagcc

SEQ ID NO: 76453 - DNA, 110 bp, synthetic construct
  source 1..110: mol_type = other DNA
ggctgtctcagcctccagctcactgtttagcctgggacaagtaacttaacctctctgagctctggtgtgctcatccgtaaaacggggatggggatgcttgtgatgaggat

SEQ ID NO: 76454 - DNA, 110 bp, synthetic construct
  source 1..110: mol_type = other DNA
tgagctctggtgtgctcatccgtaaaacggggatggggatgcttgtgatgaggattcaatgagattacatatgtaatagaggttatagggcaagtcccagcaccggccac

SEQ ID NO: 76455 - DNA, 110 bp, synthetic construct
  source 1..110: mol_type = other DNA
agggttccaaaacccctctatgaatgtggtggagaagcactgtgggcacagcacagggggattcatgagtgtatgccatggacttcatgaggtcccaccaggtgatggag

SEQ ID NO: 76456 - DNA, 110 bp, synthetic construct
  source 1..110: mol_type = other DNA
gggggattcatgagtgtatgccatggacttcatgaggtcccaccaggtgatggaggggtgagaccaggtcagatggcagcacagattccaaagaggattttgagttaagg

SEQ ID NO: 76457 - DNA, 110 bp, synthetic construct
  source 1..110: mol_type = other DNA
ataaacaaatggaattaatatcctctgatatctgaaatttgccaacagttagttggaatcagcagcaatgaataaggtgattcatcaaaacacatgaagtaagactgact

SEQ ID NO: 76458 - DNA, 110 bp, synthetic construct
  source 1..110: mol_type = other DNA
ctggtgggcagggctggcccttaacccagttgtctctcaggccccccttcactgggagcccattatccactggtatgtgggtccagattctgggatggctggctgcactt

SEQ ID NO: 76459 - DNA, 110 bp, synthetic construct
  source 1..110: mol_type = other DNA
ccaagctttgtcatgctctgtaacatctggtgccagcaggccactgagccagtacgtcctttattgaaacatttggagtgcccgctgattgccagaaggaatttccatca

SEQ ID NO: 76460 - DNA, 110 bp, synthetic construct
  source 1..110: mol_type = other DNA
gtcctttattgaaacatttggagtgcccgctgattgccagaaggaatttccatcagaaatctagctatcgaaccatgcttttcaaatcttgttctagtctcccatggatg

SEQ ID NO: 76461 - DNA, 110 bp, synthetic construct
  source 1..110: mol_type = other DNA
tcctataaggcgtataaattttaaaatttccacctatcagattgacaaagatcgaacacaacattgagacagtttacatttcttggatgttataaggttatttgtaccag

SEQ ID NO: 76462 - DNA, 110 bp, synthetic construct
  source 1..110: mol_type = other DNA
ccccattgcacagtcttgcctcctttgtaattgacactttttttttttgatgttcagatccatgactgttaatactgctgtagagttgtgtaaccaccacatggtcagga

SEQ ID NO: 76463 - DNA, 110 bp, synthetic construct
  source 1..110: mol_type = other DNA
aacatgggtctgcacatccataatggccacacagtttgaccttagatagctgagccatagctattacattttcctttttttttttctttttttgtctttttagggccata

SEQ ID NO: 76464 - DNA, 110 bp, synthetic construct
  source 1..110: mol_type = other DNA
cttgtcagacctcaatttccctgtctgtaaaatggagatgattgtagctgcccatgttcccactgcaaggtgctgccccgggaataatcaggtaatgacagaaaaaatac

SEQ ID NO: 76465 - DNA, 110 bp, synthetic construct
  source 1..110: mol_type = other DNA
caggttgaccgttttggactttatcctgggagtaaagagaatagttagcaggcatatttggacaccataccaggtaacttaaccttgcatcctcagctcacttctttctc

SEQ ID NO: 76466 - DNA, 110 bp, synthetic construct
  source 1..110: mol_type = other DNA
atttggacaccataccaggtaacttaaccttgcatcctcagctcacttctttctctagctattgttgcagcatctagcccctctgaggtataaatagccagtgctttacc

SEQ ID NO: 76467 - DNA, 110 bp, synthetic construct
  source 1..110: mol_type = other DNA
tgattaggcaacagcatcccaggccctccctgacctagggcatcttggtgttgtctggtggtgggtggctgacagcctggattacctgtggtgatgcttggctgccagct

SEQ ID NO: 76468 - DNA, 110 bp, synthetic construct
  source 1..110: mol_type = other DNA
tggtggtgggtggctgacagcctggattacctgtggtgatgcttggctgccagctgacccagatttgggatggaggaagaagagaggaggtgtggagagtggtgcaaggg

SEQ ID NO: 76469 - DNA, 110 bp, synthetic construct
  source 1..110: mol_type = other DNA
ctgcaatccacctgccaagtcacataacgtccctgggccctgactcctcccgggactggtctgccctgtgtttgaacctgaatgcctgccccaggtgccaagaattgttt

SEQ ID NO: 76470 - DNA, 110 bp, synthetic construct
  source 1..110: mol_type = other DNA
ctggtctgccctgtgtttgaacctgaatgcctgccccaggtgccaagaattgtttttatctcaggactgcaagacctggttgcctgctgactggaaaggccaggatttgg

SEQ ID NO: 76471 - DNA, 110 bp, synthetic construct
  source 1..110: mol_type = other DNA
gctcccaggagaaaacgattttgtgtcagggtgtttcattggctgggccgccgtgcacagatttacggtgccgggaagaagggaacaggactgtgataaactgtaggccg

SEQ ID NO: 76472 - DNA, 110 bp, synthetic construct
  source 1..110: mol_type = other DNA
cccctcactggcctccctgcccacccccacagctgaggtggccttcccgaagcgtgactcagactgtattgcccttctgctcagaagccacatgggccttcccagtgcac

SEQ ID NO: 76473 - DNA, 110 bp, synthetic construct
  source 1..110: mol_type = other DNA
ggctgcgcactgttttcagggagccacgtgtggagctttgggcttcagtgtcacgtgcaaattgttaccacgtacaagcctttattgaatgccagctgtggacatgcacc

SEQ ID NO: 76474 - DNA, 110 bp, synthetic construct
  source 1..110: mol_type = other DNA
ggatttgagttgccacctggagtcatttccttagcacatttttatgctcacgcatcttctttgtaaagctaaaatgtattagctttccgtatgctacaggctcaatgatg

SEQ ID NO: 76475 - DNA, 110 bp, synthetic construct
  source 1..110: mol_type = other DNA
aaattaaaaaaaaaagagcaatgtgtagaatggatgacaacaaaggagtggccatgtaccaggggagactgtccttcaggtagctctttctcgaagctaaatgagcagtt

SEQ ID NO: 76476 - DNA, 110 bp, synthetic construct
  source 1..110: mol_type = other DNA
gctctttctgtctctttctctttctctatgtctctgcctctctcttgctgcagctgccagaatctgcccgtcctgcttgttccttggtgattgtagttgtagacactgta

SEQ ID NO: 76477 - DNA, 110 bp, synthetic construct; identical to SEQ ID NO: 76476
  source 1..110: mol_type = other DNA

SEQ ID NO: 76478 - DNA, 110 bp, synthetic construct
  source 1..110: mol_type = other DNA
gcacacctcgggccatactaataggcaggaggattaaacagagagggcacatgggggtggggtaggctcgataccacacaccagtacagcttggaatcagcggctgcaac

SEQ ID NO: 76479 - DNA, 110 bp, synthetic construct
  source 1..110: mol_type = other DNA
ggtggggtaggctcgataccacacaccagtacagcttggaatcagcggctgcaacccatcaactcctgtctgagcatgtggtggggtcttggtgtaacttgaccttgccc

SEQ ID NO: 76480 - DNA, 110 bp, synthetic construct
  source 1..110: mol_type = other DNA
tctaaatagaaaaaaggagaaatatacagctgcaaagtgtgcaggaactccccgcgatctatgctttcctcctgcttttttgcaccaagccacagtttccggtttctgcc

SEQ ID NO: 76481 - DNA, 110 bp, synthetic construct
  source 1..110: mol_type = other DNA
tagcaatcaggaagcatttcggggagaccccaaaaagccttcaaaagggcccaattctccaaggtccagtaacatgctctgacctcttttctccttctcagaaatgaggg

SEQ ID NO: 76482 - DNA, 110 bp, synthetic construct
  source 1..110: mol_type = other DNA
gcaagcttcacctttagtctctggtccagccacccatctatccatgctcccccacaggaaacctaccattccctgcggctaacgcagtgttggggcgggggaagtggggt

SEQ ID NO: 76483 - DNA, 110 bp, synthetic construct
  source 1..110: mol_type = other DNA
aggaaacctaccattccctgcggctaacgcagtgttggggcgggggaagtggggtagtgagagggtctccagggttccagtgcgtggttccaaatggggagcccagccct

SEQ ID NO: 76484 - DNA, 110 bp, synthetic construct; identical to SEQ ID NO: 76482
  source 1..110: mol_type = other DNA

SEQ ID NO: 76485 - DNA, 110 bp, synthetic construct; identical to SEQ ID NO: 76483
  source 1..110: mol_type = other DNA

SEQ ID NO: 76486 - DNA, 110 bp, synthetic construct
  source 1..110: mol_type = other DNA
cttatgacctggagatggaaggttatcctggattatttcagtggattctgtctcatcacatgaatccttgaagacggagagcatttctggctgagtaggagagatgtgag

SEQ ID NO: 76487 - DNA, 110 bp, synthetic construct
  source 1..110: mol_type = other DNA
tcacatgaatccttgaagacggagagcatttctggctgagtaggagagatgtgaggggagaaggattgtccctgtggctgactttgaagatggagagggggccgagaggg

SEQ ID NO: 76488 - DNA, 110 bp, synthetic construct
  source 1..110: mol_type = other DNA
atccctcattccccttgcgctctgcacctggccgtctggagcatccatggcagggagcttaggcaacctgcacgctcatttctgttcctctccaaactggaaggctgccg

SEQ ID NO: 76489 - DNA, 110 bp, synthetic construct
  source 1..110: mol_type = other DNA
agcttaggcaacctgcacgctcatttctgttcctctccaaactggaaggctgccgaggcaggcattgtatgtggcatgcaaaaggcactcaataagtgaacaaatgaata

SEQ ID NO: 76490 - DNA, 110 bp, synthetic construct
  source 1..110: mol_type = other DNA
aaatgcacattgaattgggctttttctgcattctggggccaagacaagtcacatgaccagctcagatacacaaggtggagaaagggattccacttcctgatggaagatgg

SEQ ID NO: 76491 - DNA, 110 bp, synthetic construct
  source 1..110: mol_type = other DNA
ttgcagaacggaagcagactcatagagtttgaaacacttagggtttaccaacagggacagggtggggggaggcagggacagactggggatggggaattagcgtgtgtcca

SEQ ID NO: 76492 - DNA, 110 bp, synthetic construct
  source 1..110: mol_type = other DNA
gccagggattgaatctgagccgcatcatcgacaacacaggatcctttaaccaactgtggcagggacagatcaaaccctcacctctgcagtgaccgagctgctgcagtcag

SEQ ID NO: 76493 - DNA, 110 bp, synthetic construct
  source 1..110: mol_type = other DNA
tctgtgcaggagtcttcagacttcccttccactcccaaccaaatgaactctcaacttctcagcctggcacagagaacctctcactcctggccttctgcccgcctctgcaa

SEQ ID NO: 76494 - DNA, 110 bp, synthetic construct
  source 1..110: mol_type = other DNA
ttctcagcctggcacagagaacctctcactcctggccttctgcccgcctctgcaagcctcacctccctcagctgtccccagagctccccaaagagacaggctctccttcc

SEQ ID NO: 76495 - DNA, 110 bp, synthetic construct
  source 1..110: mol_type = other DNA
tttggagtcaattttgagcatttgcctattaggaggtgttggctggaggggtggtacgggtcttggggaaggtcagctggaccaggcatttgtgcgccatccccttgcat

SEQ ID NO: 76496 - DNA, 110 bp, synthetic construct
  source 1..110: mol_type = other DNA
caaccaacttcataccagctcctcactgggtccccacccctccactcagctcctgcctcctgatccttgttatccctctgccgctcacccccagttctgtctccaatctt

SEQ ID NO: 76497 - DNA, 110 bp, synthetic construct
  source 1..110: mol_type = other DNA
cctcctgatccttgttatccctctgccgctcacccccagttctgtctccaatcttcacattcagcctggataactcaggaaacctggaaaggaagccattcatttgcaac

SEQ ID NO: 76498 - DNA, 110 bp, synthetic construct
  source 1..110: mol_type = other DNA
gctgcatgctgtatactgaaccacatgtcctacaggaagagagggaagataagaacagctgggaaggctaagagtatcgactataggcactcatgttttgatgagcaaat

SEQ ID NO: 76499 - DNA, 110 bp, synthetic construct
  source 1..110: mol_type = other DNA
cagctgggaaggctaagagtatcgactataggcactcatgttttgatgagcaaatgggctttattctcaaggctgggcaaaactaccgtcaaatgtatagctgaagtcac

SEQ ID NO: 76500 - DNA, 110 bp, synthetic construct
  source 1..110: mol_type = other DNA
gatccactaggtgcagtctgaggacccagggtcatatacagactggtcctctaggtatggtctgaagagccagggtcaagtcgcacaggtaggtagaattggtccatcgg

SEQ ID NO: 76501 - DNA, 110 bp, synthetic construct
  source 1..110: mol_type = other DNA
tatggtctgaagagccagggtcaagtcgcacaggtaggtagaattggtccatcgggccaagcctgtctgccaggtgtagtcttttttttttttttttgtctttttgccat

SEQ ID NO: 76502 - DNA, 110 bp, synthetic construct
  source 1..110: mol_type = other DNA
cccacgccagacctgcctccctttgatctgcagtcaggacaagctctgtgctgcctcgggtcacggcacatgctgtcccctttctctgtcctccacttagccaaatccac

SEQ ID NO: 76503 - DNA, 110 bp, synthetic construct
  source 1..110: mol_type = other DNA
tcgggtcacggcacatgctgtcccctttctctgtcctccacttagccaaatccacatccaacgccacctcttcgagaggtaggactgcccccatctctgtcttcgccccc

SEQ ID NO: 76504 - DNA, 110 bp, synthetic construct
  source 1..110: mol_type = other DNA
cgctttggattccgcgggcgcaggtgcatgatgtcactctcggccttctcatacgccagggacacagatggaaactggccgggagcagagggaaccggggttgagggttt

SEQ ID NO: 76505 - DNA, 110 bp, synthetic construct
  source 1..110: mol_type = other DNA
acataagaattgccaatgtgggatatttaggcgtttgagtccatgttctctggattcattcaagctggaattctaggcttccagtgtctcagagcagagataggaaaaca

SEQ ID NO: 76506 - DNA, 110 bp, synthetic construct
  source 1..110: mol_type = other DNA
ccctctgtgtctctggttgctgggattcctgcaaatctgacctgccggagtcgtggggatgcccaccccactcctgagctgctgtggttccgagatggggtccagctgga

SEQ ID NO: 76507 - DNA, 110 bp, synthetic construct
  source 1..110: mol_type = other DNA
aaagtgctgttatttcttcaaatatattaagcatagttattttatattctgtcagataattccagtatttgaagctagactctgttgtttctgctgctgcttgctcatgg

SEQ ID NO: 76508 - DNA, 110 bp, synthetic construct
  source 1..110: mol_type = other DNA
actttgggccttgccttgcctcttagctatcaaagataaaaatacaggtgttaggtggtatctataaactggatggaaaataccaaagagaagacataaaacaaccatac

SEQ ID NO: 76509 - DNA, 110 bp, synthetic construct
  source 1..110: mol_type = other DNA
tctctttcatcacttttgtggtaatgttgttactgacattaccttcattggacttctcccctctcttgcaaatgaaggcagcagagagggtttgtgcagcagccctaggt

SEQ ID NO: 76510 - DNA, 110 bp, synthetic construct
  source 1..110: mol_type = other DNA
ctcccctctcttgcaaatgaaggcagcagagagggtttgtgcagcagccctaggtttcagcttgcctctcttggcgtggaatttcttccccatgagccaaggcaaaggca

SEQ ID NO: 76511 - DNA, 110 bp, synthetic construct
  source 1..110: mol_type = other DNA
ctggccccagttggagaattttcaggtaaagccctagcagctgctgggaccacctatcctgaggatcttcccgtcaaaattactgaagcagcactagctgcccagcactt

SEQ ID NO: 76512 - DNA, 110 bp, synthetic construct
  source 1..110: mol_type = other DNA
atcctgaggatcttcccgtcaaaattactgaagcagcactagctgcccagcacttggtagctggagcaagaactgacatttgggagccatgggctccacagggtagggta

SEQ ID NO: 76513 - DNA, 110 bp, synthetic construct
  source 1..110: mol_type = other DNA
ttccttcccagccagcagggatatgccctgccatgaacagcttgtctcgtcctgattggcacttacctaggctccatcttctcttctcatccctcacaaccatccagggt

SEQ ID NO: 76514 - DNA, 110 bp, synthetic construct
  source 1..110: mol_type = other DNA
ttggcacttacctaggctccatcttctcttctcatccctcacaaccatccagggttctttcccttgctctaacagagtaattacatctggcttagaaatggaacagcctc

SEQ ID NO: 76515 - DNA, 110 bp, synthetic construct
  source 1..110: mol_type = other DNA
gtttgccatggttcctagtcaatagatttgcaactgacttggtgccattcctggctcgtgcctgcttctgtccactttctaccccagcacccacaaaactagcctccgag

SEQ ID NO: 76516 - DNA, 110 bp, synthetic construct
  source 1..110: mol_type = other DNA
tcgtgcctgcttctgtccactttctaccccagcacccacaaaactagcctccgagccaccctaggctgggcatggggccctctcagcccaggggcatcattctagggatt

SEQ ID NO: 76517 - DNA, 110 bp, synthetic construct
  source 1..110: mol_type = other DNA
cagcgtaaactgcggcaacgctggatcctttaacccactgtgctggcccaggggtcgaacctgtgtctcagtgctgcagagattcatgtatcctgtggcaccacagcagg

SEQ ID NO: 76518 - DNA, 110 bp, synthetic construct
  source 1..110: mol_type = other DNA
cgaacctgtgtctcagtgctgcagagattcatgtatcctgtggcaccacagcaggaatttctggtagttctgtttctgtttgtctttttagggccgcacccacggcacat

SEQ ID NO: 76519 - DNA, 110 bp, synthetic construct
  source 1..110: mol_type = other DNA
aaacttagagaggtcaagttcgttttctgtggtcccacacacgacatggcagagggaggatttgaacccacgtttgtttagacgcttggagcactgccgtgttgtctctt

SEQ ID NO: 76520 - DNA, 110 bp, synthetic construct
  source 1..110: mol_type = other DNA
gaggatttgaacccacgtttgtttagacgcttggagcactgccgtgttgtctcttcctcacccttgcagaccttggcaaattgatatctcgatacatgtgtcactcctca

SEQ ID NO: 76521 - DNA, 110 bp, synthetic construct
  source 1..110: mol_type = other DNA
atgcgctgggcctcccctctggcctcttacatcctctccgccattcaccctgctctgggcttaggaagctgaccgtatgcaggtctgcccctaatatttgtggggaccgg

SEQ ID NO: 76522 - DNA, 110 bp, synthetic construct
  source 1..110: mol_type = other DNA
tgggcttaggaagctgaccgtatgcaggtctgcccctaatatttgtggggaccgggacataagtacatatgtagacccacccacatctcagatatctgagcaggggattt

SEQ ID NO: 76523 - DNA, 110 bp, synthetic construct
  source 1..110: mol_type = other DNA
ttctttcactacgctaatgtttttgagattcattcatgtgtgtatcagtagcttgttactattccattgtatgtatatactacaacttgtttatccgtcctcctcatgtg

SEQ ID NO: 76524 - DNA, 110 bp, synthetic construct
  source 1..110: mol_type = other DNA
gtcctggtactggatgtaggcatccaccgcccagatcccaggcagggctgggggaggaggagctcttttactaccttagaatggtgctggcagagcaggacatagcatct

SEQ ID NO: 76525 - DNA, 110 bp, synthetic construct
  source 1..110: mol_type = other DNA
ggaggagctcttttactaccttagaatggtgctggcagagcaggacatagcatctcacagtcctgtcatcttgctgtatgattttgagaactcagggtacaatatgaatt

SEQ ID NO: 76526 - DNA, 110 bp, synthetic construct
  source 1..110: mol_type = other DNA
ttccgcccccgctcagggcccaggcagaatcgatggcagaacatcttctgaaacagaaacacggccagtggcttgttgagcatgtaccctgtcatccctgtgtcatgccc

SEQ ID NO: 76527 - DNA, 110 bp, synthetic construct
  source 1..110: mol_type = other DNA
gaaacacggccagtggcttgttgagcatgtaccctgtcatccctgtgtcatgcccttgagatgcgggtagaactgagacacactgctcgcctcatggtgtttctggggtg

SEQ ID NO: 76528 - DNA, 110 bp, synthetic construct; identical to SEQ ID NO: 76526
  source 1..110: mol_type = other DNA

SEQ ID NO: 76529 - DNA, 110 bp, synthetic construct; identical to SEQ ID NO: 76527
  source 1..110: mol_type = other DNA

SEQ ID NO: 76530 - DNA, 110 bp, synthetic construct
  source 1..110: mol_type = other DNA
agtgggcctttggatctggatgaaatattgacctacttctggtcagttgatgcacagcgtttgttctaagcttctgagcgcccctactcttctggtcacctgggccctcc

SEQ ID NO: 76531 - DNA, 110 bp, synthetic construct
  source 1..110: mol_type = other DNA
agcgtttgttctaagcttctgagcgcccctactcttctggtcacctgggccctcctcccagccccctagccctgcccacaatcagcagctaactgtgtaagcttcccagt

SEQ ID NO: 76532 - DNA, 110 bp, synthetic construct
  source 1..110: mol_type = other DNA
gaggtctggcctctgttgacctccctctctgtggcctcctcctgcaagtccctctctcaggggaacccagttcccaggtgagtgtcttgggccttgtccgaatgcctccc

SEQ ID NO: 76533 - DNA, 110 bp, synthetic construct
  source 1..110: mol_type = other DNA
caatgagttcaggccagtgcctttttctagccccagagtatcttggtaagagcgaattatccccaaaaagtgagagtcaagacactagcactccttatgggaggactcat

SEQ ID NO: 76534 - DNA, 110 bp, synthetic construct
  source 1..110: mol_type = other DNA
tacacaagggtgtgaactcccctagggcaggaacttggaggctgcctgtcacaacccccaaatgtgcatgcctcacaggaacctctccctaacccacaatttgtaatttc

SEQ ID NO: 76535 - DNA, 110 bp, synthetic construct
  source 1..110: mol_type = other DNA
ccccaaatgtgcatgcctcacaggaacctctccctaacccacaatttgtaatttcagctccacacttgacatccatgtggttgtgcatgacatcacacgtccaacataga

SEQ ID NO: 76536 - DNA, 110 bp, synthetic construct
  source 1..110: mol_type = other DNA
tcctggggagaagggctggggttagggggctgggatgctcctaagcacccctgcgtgtcccggaaaggaggcatccaggttccgccatcctactcaccagtacagtggag

SEQ ID NO: 76537 - DNA, 110 bp, synthetic construct
  source 1..110: mol_type = other DNA
ctctcccctggtataaatcctccaatggtgtctgcctctgtctgggatcgaccagaacaacaggactagtggaagctgtataggaagagactggttgcaaggaattggct

SEQ ID NO: 76538 - DNA, 110 bp, synthetic construct
  source 1..110: mol_type = other DNA
aacaacaggactagtggaagctgtataggaagagactggttgcaaggaattggcttatgtgattgtgggggctggccaggcaagttggaaacgcacagggcaggctgtca

SEQ ID NO: 76539 - DNA, 110 bp, synthetic construct
  source 1..110: mol_type = other DNA
gccctaagcgggagtcccatcattgcccatttcccaaataaggaaactgagaggatcagagaggttgggtgactcacctcaggtcacagagctaaccgggggaaagcaag

SEQ ID NO: 76540 - DNA, 110 bp, synthetic construct
  source 1..110: mol_type = other DNA
tcagagaggttgggtgactcacctcaggtcacagagctaaccgggggaaagcaagaaattaacctggctggtcccacttaaagccaccctgcctcgcagcccccctctca

SEQ ID NO: 76541 - DNA, 110 bp, synthetic construct
  source 1..110: mol_type = other DNA
tgttaatggattaatggaggagtagggggtgcaggggccaaccttccacccactgcagccactgcagcacaggggcgcacagggtgggcttcccacttaaccttgaccgg

SEQ ID NO: 76542 - DNA, 110 bp, synthetic construct
  source 1..110: mol_type = other DNA
tagggttttagcatcagtgtcactctctgctgagcttttcccaggcaacgcaagacagcatccgggctccagggcacttatcagtgtgaccagctctgttccttcatgtg

SEQ ID NO: 76543 - DNA, 110 bp, synthetic construct
  source 1..110: mol_type = other DNA
cagcatccgggctccagggcacttatcagtgtgaccagctctgttccttcatgtgatagttgttcattgtattcctctcttgggtcggcttactaggggcaggtctgatg

SEQ ID NO: 76544 - DNA, 110 bp, synthetic construct; identical to SEQ ID NO: 76542
  source 1..110: mol_type = other DNA

SEQ ID NO: 76545 - DNA, 110 bp, synthetic construct; identical to SEQ ID NO: 76543
  source 1..110: mol_type = other DNA

SEQ ID NO: 76546 - DNA, 110 bp, synthetic construct
  source 1..110: mol_type = other DNA
atgcgggggcctaggtgcattgcaggcactgtccaaatcctttaatattcagaagcttctggagttccctttcggcctagtggttaaggatctgggttgtcacagctatg

SEQ ID NO: 76547 - DNA, 110 bp, synthetic construct
  source 1..110: mol_type = other DNA
cttctggagttccctttcggcctagtggttaaggatctgggttgtcacagctatggcgtgggtttccgtccttggcccgggaacttccacgtgccacaggcgctgccaaa

SEQ ID NO: 76548 - DNA, 110 bp, synthetic construct
  source 1..110: mol_type = other DNA
tggacaaggggcaggtgatgaccggttactaccgttggctgcagcgcgctgggggcttcgtgtggctgcagtctgtggccactgtggccgtgagtgggaagagccctgga

SEQ ID NO: 76549 - DNA, 110 bp, synthetic construct
  source 1..110: mol_type = other DNA
cttcgtgtggctgcagtctgtggccactgtggccgtgagtgggaagagccctggagagcgccacgtgctctgggtcagctacgtgctcaggtgagggttgcgcccccttc

SEQ ID NO: 76550 - DNA, 110 bp, synthetic construct
  source 1..110: mol_type = other DNA
gcctgggcattcacccatcatccatccacctttttgtcacgctgagaaccacacccagctgcccaagtgccaggaacccagcttcctcccctgacctcctcagccaccac

SEQ ID NO: 76551 - DNA, 110 bp, synthetic construct
  source 1..110: mol_type = other DNA
cctgccaggccaccgggaactcctgaaattttgttttaatctttaagtgcatgtccacatgtggctcctgtattgaactgggcaattctagagttgcctgtgcaacttgt

SEQ ID NO: 76552 - DNA, 110 bp, synthetic construct
  source 1..110: mol_type = other DNA
cacatgtggctcctgtattgaactgggcaattctagagttgcctgtgcaacttgtgctgacagccaattggctgtaacttagtcatgtgaccaaagctgccgcaagggaa

SEQ ID NO: 76553 - DNA, 110 bp, synthetic construct
  source 1..110: mol_type = other DNA
atcccctcctccaacctcttttgtgggctttgaatcctggttgaattaaaaatctaacatcagaatgcttccaactgatgcagtttggggggggttcttcctattgcaca

SEQ ID NO: 76554 - DNA, 110 bp, synthetic construct
  source 1..110: mol_type = other DNA
aacatcagaatgcttccaactgatgcagtttggggggggttcttcctattgcacatttgtattgggtacatggggaactcgctgctcctggggttttatgtgtacacctt

SEQ ID NO: 76555 - DNA, 110 bp, synthetic construct; identical to SEQ ID NO: 76553
  source 1..110: mol_type = other DNA

SEQ ID NO: 76556 - DNA, 110 bp, synthetic construct; identical to SEQ ID NO: 76554
  source 1..110: mol_type = other DNA

SEQ ID NO: 76557 - DNA, 110 bp, synthetic construct
  source 1..110: mol_type = other DNA
cccctgaccaacttaggacttcccagcctcccgctattccagtgcgcatgtgtctgaggccacgggctccgctactctcaggaacccagagctcaggcgctcaaagccca

SEQ ID NO: 76558 - DNA, 110 bp, synthetic construct
  source 1..110: mol_type = other DNA
gaggccacgggctccgctactctcaggaacccagagctcaggcgctcaaagcccaggcgtccaggccccaactctctctcaccctagaagccaagaattagggtctccag

SEQ ID NO: 76559 - DNA, 110 bp, synthetic construct
  source 1..110: mol_type = other DNA
aatttagtttaggcggtctgtagtagtcagagaagggtttctggggatggtggtgctcagtcgggttctgaagcatgagtaggagttcgttggctggaacgatagtgtaa

SEQ ID NO: 76560 - DNA, 110 bp, synthetic construct
  source 1..110: mol_type = other DNA
ctcagtcgggttctgaagcatgagtaggagttcgttggctggaacgatagtgtaaagttgtccagaatgaggaaatagtgaggaccaaggctgggtgtgtgcatgtgtgc

SEQ ID NO: 76561 - DNA, 110 bp, synthetic construct
  source 1..110: mol_type = other DNA
atggcggtggaaacacacagtatttgtcttttggtgccaggctcctgtcacttggcacaatgtcctcaagcttcctccaggtggtagcacaggtcagatattgctgtctt

SEQ ID NO: 76562 - DNA, 110 bp, synthetic construct
  source 1..110: mol_type = other DNA
cacaatgtcctcaagcttcctccaggtggtagcacaggtcagatattgctgtctttgtgttcccttcatggcccagtggttaacgaacctgagtaggatccatgaggatt

SEQ ID NO: 76563 - DNA, 110 bp, synthetic construct
  source 1..110: mol_type = other DNA
atggctcagtagtaatcaacccaactagtagtggatgcaagttcaataccttgcccctgttcaggaggttaagcattgcagtgagctgtggtgtaggtcagagtccaggc

SEQ ID NO: 76564 - DNA, 110 bp, synthetic construct
  source 1..110: mol_type = other DNA
cctgttcaggaggttaagcattgcagtgagctgtggtgtaggtcagagtccaggctcccatctggccttagagtggctgtggtgtacgccggcacctgtagctctgattc

SEQ ID NO: 76565 - DNA, 110 bp, synthetic construct
  source 1..110: mol_type = other DNA
gactgacaagcatccagcccaagagagggaggagctgcccaggagcagaggaggcagctcaggccagaagtcttcactcagagcactctcctccctctcaaacggtggaa

SEQ ID NO: 76566 - DNA, 110 bp, synthetic construct
  source 1..110: mol_type = other DNA
agctcaggccagaagtcttcactcagagcactctcctccctctcaaacggtggaagggagttctcgctgcagttcagcaggttaagcaccccattagtttccatgaggat

SEQ ID NO: 76567 - DNA, 110 bp, synthetic construct
  source 1..110: mol_type = other DNA
ctggtgcccagttaacattgtcctcagaaatgatgatatccaactccaagaacctcctctttcttcccccattccttcacttaatcactctttcttctggggagccggga

SEQ ID NO: 76568 - DNA, 110 bp, synthetic construct
  source 1..110: mol_type = other DNA
cctctttcttcccccattccttcacttaatcactctttcttctggggagccgggacctatgggctaaagagcaaattgactttgagtgtacatttcctctgggcccagaa

SEQ ID NO: 76569 - DNA, 110 bp, synthetic construct
  source 1..110: mol_type = other DNA
acaaacatttgctggaatctggttattcccccccccatttatgcagccgccacataagtcaacaactggctagctccacggtaggtgacacggtgcccagagaggagtca

SEQ ID NO: 76570 - DNA, 110 bp, synthetic construct
  source 1..110: mol_type = other DNA
aagtcaacaactggctagctccacggtaggtgacacggtgcccagagaggagtcagacctgtcacctgccctgcccccaaggtgcttcccaccccgtgtgggctcgggca

SEQ ID NO: 76571 - DNA, 110 bp, synthetic construct
  source 1..110: mol_type = other DNA
cccctgcgcaggtgcgcgcaaccttgttttggtccggttggtggcagccattattatttataggcataaattagcgtcctgagaattctaagactccccaccgtgcggtg

SEQ ID NO: 76572 - DNA, 110 bp, synthetic construct
  source 1..110: mol_type = other DNA
ggctgatgagtaccgtctgcaagagacggaaatcctgggctttgggatgaagattccacagggccccattatccatcacgtcaacggcagctgacctttcagggctttgc

SEQ ID NO: 76573 - DNA, 110 bp, synthetic construct
  source 1..110: mol_type = other DNA
ccacagggccccattatccatcacgtcaacggcagctgacctttcagggctttgccacggtcaggatggcagccaaagccaccactggcgatttcagctcggacgcacag

SEQ ID NO: 76574 - DNA, 110 bp, synthetic construct; identical to SEQ ID NO: 76572
  source 1..110: mol_type = other DNA

SEQ ID NO: 76575 - DNA, 110 bp, synthetic construct; identical to SEQ ID NO: 76573
  source 1..110: mol_type = other DNA

SEQ ID NO: 76576 - DNA, 110 bp, synthetic construct
  source 1..110: mol_type = other DNA
gattcatttccgtggcgccacgatggggactgctgtggtgtgattctttattttgtctgtccctcaccagctgcctcccctctgcatcacaagctccccggaggcagaga

SEQ ID NO: 76577 - DNA, 110 bp, synthetic construct; identical to SEQ ID NO: 76576
  source 1..110: mol_type = other DNA

SEQ ID NO: 76578 - DNA, 110 bp, synthetic construct
  source 1..110: mol_type = other DNA
accgaccctttttccaggtaccgtttggtgcctcttactgtgtgcagcagatcattgagccctcaacacagtctcatctcggaactgccccctgcgccgtctccaccccc

SEQ ID NO: 76579 - DNA, 110 bp, synthetic construct
  source 1..110: mol_type = other DNA
gtgctgctatgagtattggggtacatgtatcttttcgacttagctttctctggatatatgcccattagtaggactgctggatcacatgctagatctgtttgtagttttct

SEQ ID NO: 76580 - DNA, 110 bp, synthetic construct; identical to SEQ ID NO: 76579
  source 1..110: mol_type = other DNA

SEQ ID NO: 76581 - DNA, 110 bp, synthetic construct
  source 1..110: mol_type = other DNA
gccctccaagttatgtgtattcattctctgttgccacagacttggcattcaaaacagcatgcatttgttaccacatggttcacgggtgggagttgagaacagcttggctt

SEQ ID NO: 76582 - DNA, 110 bp, synthetic construct
  source 1..110: mol_type = other DNA
agcatgcatttgttaccacatggttcacgggtgggagttgagaacagcttggcttagctgggtcctctgctttgggttcaccagggtgaaatcagggtgtcagccagctg

SEQ ID NO: 76583 - DNA, 110 bp, synthetic construct
  source 1..110: mol_type = other DNA
ttctttgtatagattatatgtcgggaaagttatgggaggggcccacggtcatattcatatacgaggtgagtagctaagacagggtcagaatccgctttatcgtttcttgc

SEQ ID NO: 76584 - DNA, 110 bp, synthetic construct
  source 1..110: mol_type = other DNA
tctccaccactgcccacgaggccccctcctactctactcccgtctccaacacttggccccaggtacacaggcctttgaatctgctcctccttttgccagaaatgctcttc

SEQ ID NO: 76585 - DNA, 110 bp, synthetic construct
  source 1..110: mol_type = other DNA
gccccaggtacacaggcctttgaatctgctcctccttttgccagaaatgctcttctccagctggctcattctgttagctcacatgttacctccttggagaattctcccac

SEQ ID NO: 76586 - DNA, 110 bp, synthetic construct
  source 1..110: mol_type = other DNA
aggggcatttctgtctgctccctctgcgcttaggtgtactgggttggtagccaggtttgtttttgtcctgttgaacccgtggaatataagccctgctggccacccgatcc

SEQ ID NO: 76587 - DNA, 110 bp, synthetic construct
  source 1..110: mol_type = other DNA
tttgtttttgtcctgttgaacccgtggaatataagccctgctggccacccgatccaggtgatcaaggagtatattctgtatagcagccacaaaacccggggaacagccgt

SEQ ID NO: 76588 - DNA, 110 bp, synthetic construct
  source 1..110: mol_type = other DNA
gagtcggtacttcccctcagatcacaatcccaggagaaacccgagtgtgactaggttctgacaaaagatgtgcccctaaccatgaccctaacactcacatggtctggtcc

SEQ ID NO: 76589 - DNA, 110 bp, synthetic construct
  source 1..110: mol_type = other DNA
ttctgacaaaagatgtgcccctaaccatgaccctaacactcacatggtctggtccactgtttcatgaaactccgtacaatttttctttagctggtactaggtttcctgta

SEQ ID NO: 76590 - DNA, 110 bp, synthetic construct
  source 1..110: mol_type = other DNA
ctgctctgaagtcatctaatttcccaggccctgtcgtgcccctccccccaacaagataaccagataggactagggtgccagttaactttggtttcagataaaccacaact

SEQ ID NO: 76591 - DNA, 110 bp, synthetic construct
  source 1..110: mol_type = other DNA
tggggggtggggggtggggcagagagaaggcttcctcccagggtggtgggaagggtccctgacttcctgtcctgggaggtgaccctgtccctctcatttgctcttcggcc

SEQ ID NO: 76592 - DNA, 110 bp, synthetic construct
  source 1..110: mol_type = other DNA
tccctgacttcctgtcctgggaggtgaccctgtccctctcatttgctcttcggccagcagggagttccatcttctacccaacttacagctgggatgctggcttggttttt

SEQ ID NO: 76593 - DNA, 110 bp, synthetic construct
  source 1..110: mol_type = other DNA
caccctgatcctgctgcggtcaagaagatgctttgtctgctgtctgtcctttaaaatctctgagcctgacgtgtggcctgaccgtggtctcttcctgaaaatgtcccgag

SEQ ID NO: 76594 - DNA, 110 bp, synthetic construct
  source 1..110: mol_type = other DNA
atctctgagcctgacgtgtggcctgaccgtggtctcttcctgaaaatgtcccgagcacagctgagaaggacgcgtgtgctgcttcctccatctggctgctccctcaccgc

SEQ ID NO: 76595 - DNA, 110 bp, synthetic construct
  source 1..110: mol_type = other DNA
aggaattttgaacaagtggagacggaggccctggggcctttcagaggataagccgtcagggcaccaaggcccctggacactcacatgccaggagatgcgagttaaagcca

SEQ ID NO: 76596 - DNA, 110 bp, synthetic construct
  source 1..110: mol_type = other DNA
ccccaccctccagccccggcaactctggatgggattcctgtcaccacagatgagggttgattcttctagggttttacacaagaagagaacaaggatgggctcatttggtc

SEQ ID NO: 76597 - DNA, 110 bp, synthetic construct
  source 1..110: mol_type = other DNA
gttgattcttctagggttttacacaagaagagaacaaggatgggctcatttggtctgacttctttctctcagcataattgttttgtgattcatctaggttgcagctggta

SEQ ID NO: 76598 - DNA, 110 bp, synthetic construct
  source 1..110: mol_type = other DNA
ttaaaatgcaacatcatgttgcttctattgtggctcaagttttccagcttcggctgttggaagcttattcagctgagccctgagtctctctgacatgcccagcactttgt

SEQ ID NO: 76599 - DNA, 110 bp, synthetic construct
  source 1..110: mol_type = other DNA
gttggaagcttattcagctgagccctgagtctctctgacatgcccagcactttgtctgaggcccaaacgtttgtcttctgggggaggcactttcttcttctctgccctgt

SEQ ID NO: 76600 - DNA, 110 bp, synthetic construct
  source 1..110: mol_type = other DNA
gccatctgctctgttcatttcgggcagaaatgcccccatcttgtcacatgggcgtgtccctgtccctgcagatcggagactctaccgtcatttctctgggccgcctttgt

SEQ ID NO: 76601 - DNA, 110 bp, synthetic construct
  source 1..110: mol_type = other DNA
ggtcacggacggagagcccgtcccctaagcgagaacacagggggcgcccgcgcgtgtgtagacagtggactccatccgtgtaaactgtgcaaagtcgcgaacgatgagcc

SEQ ID NO: 76602 - DNA, 110 bp, synthetic construct
  source 1..110: mol_type = other DNA
cccgcgcctgggaccctcccagagtgcatcctacttacccctcagccagctgcttgtctgtgtcccttcctcatgtcctttatgcaaccactaagccctctgagggctgg

SEQ ID NO: 76603 - DNA, 110 bp, synthetic construct
  source 1..110: mol_type = other DNA
gtctgtgtcccttcctcatgtcctttatgcaaccactaagccctctgagggctgggagtcactctagcaaagtaatggaacctccgaacgacagccaggggtcagaagca

SEQ ID NO: 76604 - DNA, 110 bp, synthetic construct
  source 1..110: mol_type = other DNA
ccccctgagtttgtccacacgacactgagtatcagacccggatgaagctcagcttggaaatgtgaggccacctgattcacatgaagacggaccctgaaacgtaccatccc

SEQ ID NO: 76605 - DNA, 110 bp, synthetic construct
  source 1..110: mol_type = other DNA
atgcactagcccatgtaccatgcaccagcctctgtgtaccatgcactaacctctgcaccatgcactcacccatgcaccgctctatgcaccaggcattaatcagtgcacct

SEQ ID NO: 76606 - DNA, 110 bp, synthetic construct
  source 1..110: mol_type = other DNA
caccatgcactcacccatgcaccgctctatgcaccaggcattaatcagtgcacctcaagctctgtcctcccccctgccaggctctgtcttactgaatgacccacagctct

SEQ ID NO: 76607 - DNA, 110 bp, synthetic construct
  source 1..110: mol_type = other DNA
catttttgacatatgtacatgccagtgcacccataaccagagtcaggacagtcgacatgcacatctcccaccaaagctgcattgtgccctcttgtaatccctcccttctg

SEQ ID NO: 76608 - DNA, 110 bp, synthetic construct
  source 1..110: mol_type = other DNA
catgcacatctcccaccaaagctgcattgtgccctcttgtaatccctcccttctgtatcccccagccccaggtaaccagggtccactttctgtgacttctattagtttgt

SEQ ID NO: 76609 - DNA, 110 bp, synthetic construct
  source 1..110: mol_type = other DNA
ccttcatcacccctgtggggtttctcctgttgaaggtgttggtgatcagaaatgaccaataagtgcttcatgaaacagcagcatcactacctgctgtgggattcccagta

SEQ ID NO: 76610 - DNA, 110 bp, synthetic construct
  source 1..110: mol_type = other DNA
caattgggtgtggttgtttcaaggctgaattcttgggatgaaatttatctttagagcctagatttgcaggtcaatttgggaagctgacagccgagatgacagacacacgg

SEQ ID NO: 76611 - DNA, 110 bp, synthetic construct
  source 1..110: mol_type = other DNA
ctcagtcagtaggtgccttccaagcctttcccctcactctttgcaggtaatcacggaagtagttgggatatttagatggttcaaagctggaaggtaagaatccgaagcca

SEQ ID NO: 76612 - DNA, 110 bp, synthetic construct
  source 1..110: mol_type = other DNA
gaagtagttgggatatttagatggttcaaagctggaaggtaagaatccgaagccaaccggacctaatgctctggccttgacccccacagcccagctccaggaccttctcc

SEQ ID NO: 76613 - DNA, 110 bp, synthetic construct
  source 1..110: mol_type = other DNA
ctggtttagagatttaagcttgagagcggcttcagcctgtcatcatcctggcggctcggagatgctggggtcttgttcagtcatcctctgtaggatcgcatcgtgtcttt

SEQ ID NO: 76614 - DNA, 110 bp, synthetic construct
  source 1..110: mol_type = other DNA
tcggagatgctggggtcttgttcagtcatcctctgtaggatcgcatcgtgtctttggggaggtctgcatgtgaactgtgaggacgtccctgctcctggggtgagcgcttc

SEQ ID NO: 76615 - DNA, 110 bp, synthetic construct
  source 1..110: mol_type = other DNA
tggacatgcacggtcacagtaggaagcagcaacctggggtctcatatttgggaattcttgagttagaggtagaatccagggccagaggtaactcagatgggttgtgtgtg

SEQ ID NO: 76616 - DNA, 110 bp, synthetic construct
  source 1..110: mol_type = other DNA
cctgcagcagctgatctggggattccaatttgatgtctcttggttacaacccttttgaaaatgtaacaagcagctctcacgcccccctgctctgttgcctggcatagtgc

SEQ ID NO: 76617 - DNA, 110 bp, synthetic construct
  source 1..110: mol_type = other DNA
tgaaaatgtaacaagcagctctcacgcccccctgctctgttgcctggcatagtgcagacatggagatgaagcccacatcccacgtcccaggacctgttggggctccttgc

SEQ ID NO: 76618 - DNA, 110 bp, synthetic construct
  source 1..110: mol_type = other DNA
aaggcagccttaaaatagttccgatttgagggatgaaacccacttctagagaaagatcgggccctcctgccatttgctaccccttaaccctgtaataatagtgatgctct

SEQ ID NO: 76619 - DNA, 110 bp, synthetic construct
  source 1..110: mol_type = other DNA
atcgggccctcctgccatttgctaccccttaaccctgtaataatagtgatgctctagctgtaatcttagtgaggacagctgattaggcatcagataagcctttttgtgaa

SEQ ID NO: 76620 - DNA, 110 bp, synthetic construct
  source 1..110: mol_type = other DNA
ttaaaaatatctgtcttctcaaaaagtcctgagggtggcaagaaaaagctactatgaatgcctgcttcacacagagaagggggctgaaaaccctggtaaacccatacccc

SEQ ID NO: 76621 - DNA, 110 bp, synthetic construct
  source 1..110: mol_type = other DNA
caatactgacaacagaagcttcggcttttattgctgttaataccctgagcgatcattgtagctcagcaggaacctctgccccaatagcaactatcacattgtgatcagca

SEQ ID NO: 76622 - DNA, 110 bp, synthetic construct
  source 1..110: mol_type = other DNA
ttgtagctcagcaggaacctctgccccaatagcaactatcacattgtgatcagcatttcataagagatgccgaccaaacaggaaggcacctgctacagggcaaaaactgt

SEQ ID NO: 76623 - DNA, 110 bp, synthetic construct
  source 1..110: mol_type = other DNA
ggtgcatctttctagagggattaggaacctgctgaaacttctggtgtgttcccgatccttcggtgtttgtctcaaactcttggtttcttcctggaaagcttcaaaagctt

SEQ ID NO: 76624 - DNA, 110 bp, synthetic construct
  source 1..110: mol_type = other DNA
tccttcggtgtttgtctcaaactcttggtttcttcctggaaagcttcaaaagcttccaatgcaaatccagactttccccctcttgtgtatttttttttttttttaaagct

SEQ ID NO: 76625 - DNA, 110 bp, synthetic construct
  source 1..110: mol_type = other DNA
acccatctaaggtgtacaacccatggagttccccctcccatcaggggacattacgatggctgccggccatgttttaggatctggtcaggggaaggtgaattgggtttgtt

SEQ ID NO: 76626 - DNA, 110 bp, synthetic construct
  source 1..110: mol_type = other DNA
ggcactgagcaaagatctttccatgaaatcactaccagatattggtccttcgcccaaaccagctggaaagggtcatccttacaaaggaatacttctgttatctacacatt

SEQ ID NO: 76627 - DNA, 110 bp, synthetic construct
  source 1..110: mol_type = other DNA
acaaagccaatgctctttggatttatttcgccccccacacacatacaaactgctaaaaataggagggacagttcggcccatcctgtgttagcttttgccttatgtcacca

SEQ ID NO: 76628 - DNA, 110 bp, synthetic construct
  source 1..110: mol_type = other DNA
aaaataggagggacagttcggcccatcctgtgttagcttttgccttatgtcaccacagcagcccttgctgttttggacagaagctgtttggaatctacttttagttaatc

SEQ ID NO: 76629 - DNA, 110 bp, synthetic construct
  source 1..110: mol_type = other DNA
gatcagcatcaaatgcagggtcaggcagtggttttaatggaggctttggctcaagcatggattccaaatcttcgggctggggaatgtagacgttgggttatggttggttg

SEQ ID NO: 76630 - DNA, 110 bp, synthetic construct
  source 1..110: mol_type = other DNA
catggattccaaatcttcgggctggggaatgtagacgttgggttatggttggttggtatagactggtgggaattcaaatttttctaaactcatggtaagtatattgtaaa

SEQ ID NO: 76631 - DNA, 110 bp, synthetic construct
  source 1..110: mol_type = other DNA
tgtaacagccagagtaacaacatttcctaaaggaagtccaccagttcttagagagagtcagacagcgagcgtccttaacctcgggcaccgtccagttggcagctcaggat

SEQ ID NO: 76632 - DNA, 110 bp, synthetic construct
  source 1..110: mol_type = other DNA
agggggtgaatcggagatgcagctgccagcctgtgccacagtcatggcaacactggatacgagctgcatctttgatctttgccgcagcttgtgacaatgccagatcctca

SEQ ID NO: 76633 - DNA, 110 bp, synthetic construct
  source 1..110: mol_type = other DNA
gatgcagctgccagcctgtgccacagtcatggcaacactggatacgagctgcatctttgatctttgccgcagcttgtgacaatgccagatcctcaacccacagagcgagg

SEQ ID NO: 76634 - DNA, 110 bp, synthetic construct
  source 1..110: mol_type = other DNA
ccacgccatctcgggccctgctctgcccacgccagagcctgcttcagcgtccttcccagctgacgcgggcccctccgttcttcgcgttttcttatctctttgacctataa

SEQ ID NO: 76635 - DNA, 110 bp, synthetic construct
  source 1..110: mol_type = other DNA
ccagctgacgcgggcccctccgttcttcgcgttttcttatctctttgacctataaaatttccagcttccgtgggtggacctgagttacaaaacggagatgaaactcccaa

SEQ ID NO: 76636 - DNA, 110 bp, synthetic construct
  source 1..110: mol_type = other DNA
agaaatagaactcaaaaagctttcggtattgacctatttgctgtgtggatgtgtacagtctctggtttcgtttcagaagcagatgattctaggcaaataagctgcccaca

SEQ ID NO: 76637 - DNA, 110 bp, synthetic construct
  source 1..110: mol_type = other DNA
cagtctctggtttcgtttcagaagcagatgattctaggcaaataagctgcccacacgctgacgagcacatggccatgttttagcccacgttcctcctctttgctttggga

SEQ ID NO: 76638 - DNA, 110 bp, synthetic construct
  source 1..110: mol_type = other DNA
agaaggcaagcaagagaaactagaaattgccctttcaaactctgcaacaagccacctcaaaccttggctgcccacaggttgggtagatggttatagctgtgtgacttaaa

SEQ ID NO: 76639 - DNA, 110 bp, synthetic construct
  source 1..110: mol_type = other DNA
atcctggccttgagaaacgaagcctcactttcttcctctgtgtgtgtggcgggcctggggggagctgggaggaggccctgacggcccctgcctcttgggctgtttggagt

SEQ ID NO: 76640 - DNA, 110 bp, synthetic construct
  source 1..110: mol_type = other DNA
tggggggagctgggaggaggccctgacggcccctgcctcttgggctgtttggagtcaactctgttttgcacacaagatgcttcggcacagtgctttgtactgaggcctga

SEQ ID NO: 76641 - DNA, 110 bp, synthetic construct; identical to SEQ ID NO: 76639
  source 1..110: mol_type = other DNA

SEQ ID NO: 76642 - DNA, 110 bp, synthetic construct; identical to SEQ ID NO: 76640
  source 1..110: mol_type = other DNA

SEQ ID NO: 76643 - DNA, 110 bp, synthetic construct
  source 1..110: mol_type = other DNA
ggtgaggaaagggaagaacagctgactaaagtcaggtacctagggttccataaccggagatcagaggcattggtgtaactcaagcgtcctgcctcccaaaaggtcaatgt

SEQ ID NO: 76644 - DNA, 110 bp, synthetic construct
  source 1..110: mol_type = other DNA
gcccagaggaaaaatgatattctttcaaatttgactctacgctcctgtgttgacgtaaatcgagcccagttctctgctctacaccatgaaggttgcatgattaatgtgtc

SEQ ID NO: 76645 - DNA, 110 bp, synthetic construct
  source 1..110: mol_type = other DNA
ttaaccccgtggaactggtgtggaatgagagcggttaagagtcacagctgttcagtcatttcccattagcccaagatcttctttgtcttctttgttttcttgcatcaaga

SEQ ID NO: 76646 - DNA, 110 bp, synthetic construct
  source 1..110: mol_type = other DNA
ctgtttgtttttcgttgtgactgctgctatctgacatctttgtttttcccttctttgattccagtaacttgattatatctcttgtagaagctgaaactctgttttataag

SEQ ID NO: 76647 - DNA, 110 bp, synthetic construct
  source 1..110: mol_type = other DNA
tgattccagtaacttgattatatctcttgtagaagctgaaactctgttttataagcaacactgtgtttgatagtgacgctggggcatgggtgataggcagagctggcttt

SEQ ID NO: 76648 - DNA, 110 bp, synthetic construct; identical to SEQ ID NO: 76646
  source 1..110: mol_type = other DNA

SEQ ID NO: 76649 - DNA, 110 bp, synthetic construct; identical to SEQ ID NO: 76647
  source 1..110: mol_type = other DNA

SEQ ID NO: 76650 - DNA, 110 bp, synthetic construct
  source 1..110: mol_type = other DNA
atgctgcaggaaggaaccctataaaaaccccagagtatccttcagccctgactctatggccctgggtgcacagctttggcacaaggatgaaaggcagctcaaccaccagg

SEQ ID NO: 76651 - DNA, 110 bp, synthetic construct
  source 1..110: mol_type = other DNA
ggagatgcccacgtggcaaagcagagatacacactcagacccatctgattccagtgcaagagctcttagttgtgctcctggatttctacttgattggctgcttggtactt

SEQ ID NO: 76652 - DNA, 110 bp, synthetic construct
  source 1..110: mol_type = other DNA
gcaagagctcttagttgtgctcctggatttctacttgattggctgcttggtacttagtcatttctcagcattatttactgtgtttattcattctcctccctcctcattgg

SEQ ID NO: 76653 - DNA, 110 bp, synthetic construct
  source 1..110: mol_type = other DNA
tcattcctttctaggtcaaggccttcgatatgttgatagtggcctgggttgagatatctgtaagtcagcagtcggggcagctggagggagggattctcaggtttgaggca

SEQ ID NO: 76654 - DNA, 110 bp, synthetic construct
  source 1..110: mol_type = other DNA
ggttaaggatctggcgttgtcatgagctatggtataggttgcagacgtggcttggatccctttgctgcagctgtagctccaattagacccctagcctaggaacttccatc

SEQ ID NO: 76655 - DNA, 110 bp, synthetic construct; identical to SEQ ID NO: 76654
  source 1..110: mol_type = other DNA

SEQ ID NO: 76656 - DNA, 110 bp, synthetic construct
  source 1..110: mol_type = other DNA
aatgagagccatagcagtgatgatgccaggtccttaacccactgagccaccagggaactcttccttatcttgttcttgatcttagaggaaaagctttcagtctttcacca

SEQ ID NO: 76657 - DNA, 110 bp, synthetic construct
  source 1..110: mol_type = other DNA
aactcttccttatcttgttcttgatcttagaggaaaagctttcagtctttcaccattgaatacagtgcagcccacgggttgcattgttcatatttggcctttgttaggtt

SEQ ID NO: 76658 - DNA, 110 bp, synthetic construct
  source 1..110: mol_type = other DNA
gaatgccagcaggctcactgtcatatccaaggtaagtaatagaaacccatggaaccagctcagcaaaaacaggagtttgttacaaggattcaagaggctcagccaaaggc

SEQ ID NO: 76659 - DNA, 110 bp, synthetic construct
  source 1..110: mol_type = other DNA
cagctcagcaaaaacaggagtttgttacaaggattcaagaggctcagccaaaggcagagacacagccagcctttaggaacaaggagagaaccaggggctggaagactgtt

SEQ ID NO: 76660 - DNA, 110 bp, synthetic construct
  source 1..110: mol_type = other DNA
agcgatgtatggcatctgtaaaatgttgagtcccaagagcgaggagttttgtgctcctttcttcatgtttggggcaagggatacatcgagcagtggacggtgttttgatc

SEQ ID NO: 76661 - DNA, 110 bp, synthetic construct
  source 1..110: mol_type = other DNA
acattatctcatagaacacctcaaatatctcatttgaaaatacatgcacatggatgacccctcaagaaactgtgacctttgcaacagcttcagcaacgccgatccttaac

SEQ ID NO: 76662 - DNA, 110 bp, synthetic construct
  source 1..110: mol_type = other DNA
gacccctcaagaaactgtgacctttgcaacagcttcagcaacgccgatccttaactcattgtgccacagtggaaactctcccccttttcttaaaggggaagcatttgtat

SEQ ID NO: 76663 - DNA, 110 bp, synthetic construct
  source 1..110: mol_type = other DNA
ccacagatcctcagcttctcagcgctcacttttacatcctgccgactcactccatccgtacacgttcttgggcatcggttagagcaggtgtccttgtgccccttttccaa

SEQ ID NO: 76664 - DNA, 110 bp, synthetic construct
  source 1..110: mol_type = other DNA
ccgtacacgttcttgggcatcggttagagcaggtgtccttgtgccccttttccaagtgaggaagccaggttcactggttctctttaaaaacttggggatggaccagcggg

SEQ ID NO: 76665 - DNA, 110 bp, synthetic construct
  source 1..110: mol_type = other DNA
ggcccttgggggagacagaggtggtcagggtgcagcctctagagtctaagagcagagttcagctgatgataagacagcgcaggtgcgggaagcattacactggagctccg

SEQ ID NO: 76666 - DNA, 110 bp, synthetic construct
  source 1..110: mol_type = other DNA
agttcagctgatgataagacagcgcaggtgcgggaagcattacactggagctccggggtgagagaacccctgtttagtgggggtgaggggggcagggaaaggaaggtcgg

SEQ ID NO: 76667 - DNA, 110 bp, synthetic construct
  source 1..110: mol_type = other DNA
gtggggagggtgaatttatagccaaggaacagaatgaggtaggggaatcatttcctataacagtccccctgccaggagggacgggctcacctgatttagtcttgatgttt

SEQ ID NO: 76668 - DNA, 110 bp, synthetic construct
  source 1..110: mol_type = other DNA
gaactttatttaaagaggagtcttctcccctccccaacttcatccccttcctttggtaccgctgcaaattcatagattatttttagtttactttttattgaagtaagttg

SEQ ID NO: 76669 - DNA, 110 bp, synthetic construct
  source 1..110: mol_type = other DNA
agttgtagcactgacctggaggagcctggtctcagcgaccttgaatgtcaggctacggagcttgggttccatgccaagggtcacggtgccaggaaagctttgaaacaggg

SEQ ID NO: 76670 - DNA, 110 bp, synthetic construct
  source 1..110: mol_type = other DNA
agtaggtttagcatcctttcatatgttgaactaaaactatccggttgttgatgtgtgccctgccctattcctgaattcttgtcctggtggcaaactggcccatggtcctt

SEQ ID NO: 76671 - DNA, 110 bp, synthetic construct
  source 1..110: mol_type = other DNA
tgccctgccctattcctgaattcttgtcctggtggcaaactggcccatggtccttgcagctcttgcttagagaccccatatcttttcatcttcgctaggaagcaggaagt

SEQ ID NO: 76672 - DNA, 110 bp, synthetic construct
  source 1..110: mol_type = other DNA
agatttttttttttctctccattgtataatagaaaaaaaaaaatggagtgaaatttgagattgggatgataagggctgccgcattttaggaggagataaaaaagcagtac

SEQ ID NO: 76673 - DNA, 110 bp, synthetic construct
  source 1..110: mol_type = other DNA
tgagattgggatgataagggctgccgcattttaggaggagataaaaaagcagtacctgaagggaggcgaggctgcaagtcaagcaggcaggatgccttccacttttatga

SEQ ID NO: 76674 - DNA, 110 bp, synthetic construct
  source 1..110: mol_type = other DNA
gaaacagtgctcgtttccctcagcttccaggcatggtgccctccctggggagttagacagtctgggtccagcagatcttcctgctccccggtcactcacatctctgagcc

SEQ ID NO: 76675 - DNA, 110 bp, synthetic construct
  source 1..110: mol_type = other DNA
cccaagaaagactcaagcgtgaagtacagcctggggcttgggctctgcctcctggctgatctaggctggaaccccagctctgtcccttaggaactaaccttaccatgccc

SEQ ID NO: 76676 - DNA, 110 bp, synthetic construct
  source 1..110: mol_type = other DNA
ctgatctaggctggaaccccagctctgtcccttaggaactaaccttaccatgcccatccggagaatgggcatgataatagcatctgccgcttgaagtcctgatgcgaagc

SEQ ID NO: 76677 - DNA, 110 bp, synthetic construct
  source 1..110: mol_type = other DNA
tctctaagggatgtgagtcctcggcctcactccagagcctgagggctttatcaacagctgccctgaccctacccgacaggaaaccagatccaccttctccagaggggact

SEQ ID NO: 76678 - DNA, 110 bp, synthetic construct
  source 1..110: mol_type = other DNA
accggtaactgcaggctgccgaggcagccgcctgggaagcacatgcaccctcggcacagacggcaatacttgatacgaaacggaggagtctctgcaactggaaaagccat

SEQ ID NO: 76679 - DNA, 110 bp, synthetic construct
  source 1..110: mol_type = other DNA
acagacggcaatacttgatacgaaacggaggagtctctgcaactggaaaagccattagcaagagagcacgaggggcagtgagacctgctcccggctccgtcgcagcaaga

SEQ ID NO: 76680 - DNA, 110 bp, synthetic construct
  source 1..110: mol_type = other DNA
tctgaaggaccggagtatttaacccaactgcatgatgactgtgcacctgaaaagggtgggcccctgagggaaaacctgggtgtgttaggagggtgttaagaggccaaatg

SEQ ID NO: 76681 - DNA, 110 bp, synthetic construct
  source 1..110: mol_type = other DNA
gtgggcccctgagggaaaacctgggtgtgttaggagggtgttaagaggccaaatgggtgctgcagaaatgcaaagcatgtctctgtcactactgtgcttccagaaatggg

SEQ ID NO: 76682 - DNA, 110 bp, synthetic construct
  source 1..110: mol_type = other DNA
ggattgattctctgcgtctcttatcttttctgttttattttagtcttttggttatactttctgagaaataccttgactttatctttcaacccttccttgatttttcaaaa

SEQ ID NO: 76683 - DNA, 110 bp, synthetic construct
  source 1..110: mol_type = other DNA
atgggagaaattaatgttagccgaatgtcaatatttggcagaagtttataaaaaggaaaaaatccagtttggtagtttgttgaactgtgttggaatatttctatgatttg

SEQ ID NO: 76684 - DNA, 110 bp, synthetic construct
  source 1..110: mol_type = other DNA
gtcccctttggggttggcctaggatggggtttggtaaaccatggcccacaggccagatcacactaccatttctgcgtggctcgtgagtaacaatagcttttacacttttt

SEQ ID NO: 76685 - DNA, 110 bp, synthetic construct
  source 1..110: mol_type = other DNA
gatcacactaccatttctgcgtggctcgtgagtaacaatagcttttacactttttatggttgaaaaaaataaaaagaggaagagtactttgtgccccatgaaaatgatgt

SEQ ID NO: 76686 - DNA, 110 bp, synthetic construct
  source 1..110: mol_type = other DNA
tagaaagggtgaccaggggctatagaagctgaatggtggagagggagcctcttgaggacagagattttgaacttcacgggggctcagaatcacactttggacaccttgag

SEQ ID NO: 76687 - DNA, 110 bp, synthetic construct
  source 1..110: mol_type = other DNA
aaacagagctaggaaacgtggagaggttgcaattttaagagcgatctcagtgcctgagtgactcaggttttgaagatggagggaccatggatggcatctcaagttcaagg

SEQ ID NO: 76688 - DNA, 110 bp, synthetic construct
  source 1..110: mol_type = other DNA
gagtgactcaggttttgaagatggagggaccatggatggcatctcaagttcaaggaatgagtgaaaatgggaggccgagctggagggacagcaaaggtgactgagatttg

SEQ ID NO: 76689 - DNA, 110 bp, synthetic construct
  source 1..110: mol_type = other DNA
actgttgccatagcaactgcctccctgtaacccagtgtacaggcagatcacagcagataagacaagtccaaggaggtgaatgatggggaacagcccagaaatatgtccca

SEQ ID NO: 76690 - DNA, 110 bp, synthetic construct
  source 1..110: mol_type = other DNA
gataagacaagtccaaggaggtgaatgatggggaacagcccagaaatatgtcccagaattccagtacacaccctaggcttctgaaacattcctgagaattctggaacaga

SEQ ID NO: 76691 - DNA, 110 bp, synthetic construct
  source 1..110: mol_type = other DNA
gcccactttctcaaccctcggcatctccccttggccttgatctctgctggggagatgaggctaagttaatctgccctattacactgcccctgcatccaggctgtgcctcg

SEQ ID NO: 76692 - DNA, 110 bp, synthetic construct
  source 1..110: mol_type = other DNA
tgaggctaagttaatctgccctattacactgcccctgcatccaggctgtgcctcgagatgcaggtatcaggtaagtaatgagagtgggaggttcttaggaagggccacgg

SEQ ID NO: 76693 - DNA, 110 bp, synthetic construct
  source 1..110: mol_type = other DNA
cttctgaaccccctcatctcatgttaacaccttcaaaactcagcttaagctccctttctttgggggaaccttcctagaccttcgacctcctctgggctccttggcagcct

SEQ ID NO: 76694 - DNA, 110 bp, synthetic construct
  source 1..110: mol_type = other DNA
ttctttgggggaaccttcctagaccttcgacctcctctgggctccttggcagcctgggtgtccactatttgagtacagactattctgggtcatggccatctccttgtcta

SEQ ID NO: 76695 - DNA, 110 bp, synthetic construct
  source 1..110: mol_type = other DNA
cacatggaaaaatacaatatacacccctttgtgtctggcttgtgttcaaaaatatatctgcaatttgtctgtcccctgagcatcctgcttttccatgcctgtggacctgg

SEQ ID NO: 76696 - DNA, 110 bp, synthetic construct
  source 1..110: mol_type = other DNA
atctgcaatttgtctgtcccctgagcatcctgcttttccatgcctgtggacctgggcatgcctgttctttctaccagaaagctgttgtattggcatgcctcaccctggcc

SEQ ID NO: 76697 - DNA, 110 bp, synthetic construct; identical to SEQ ID NO: 76695
  source 1..110: mol_type = other DNA

SEQ ID NO: 76698 - DNA, 110 bp, synthetic construct; identical to SEQ ID NO: 76696
  source 1..110: mol_type = other DNA

SEQ ID NO: 76699 - DNA, 110 bp, synthetic construct
  source 1..110: mol_type = other DNA
gctctgcttggccctggctatgggactgccctctgagtgtcacctgcctgcctgcagtggccctgtgcatctcttggcctccatagctcagatggtgccagtctgggctc

SEQ ID NO: 76700 - DNA, 110 bp, synthetic construct
  source 1..110: mol_type = other DNA
aaattgcctttatccatgtgtgggagggccctcctttaagaaaaatgtattgtcggaaaatgcaaatttacagaccaataaattacggggtgattagtcacgttggtctt

SEQ ID NO: 76701 - DNA, 110 bp, synthetic construct
  source 1..110: mol_type = other DNA
ggattatggagtcactagtccagggtcacacacttagcaggagccaaactcagttccatgggtctcaaaggcagtccctctcccacagggcacactttgctattcaagtg

SEQ ID NO: 76702 - DNA, 110 bp, synthetic construct
  source 1..110: mol_type = other DNA
ccatgggtctcaaaggcagtccctctcccacagggcacactttgctattcaagtgccccacccatggaaagggcacagcagcacagtatatggtgcatagtgggtacagc

SEQ ID NO: 76703 - DNA, 110 bp, synthetic construct
  source 1..110: mol_type = other DNA
tcatggaacacttttgtaaggaaattactaaggaacggatggggatggcaattatgagcccttggaagctggagggaggagatgcatggttggtactcagagatgccaga

SEQ ID NO: 76704 - DNA, 110 bp, synthetic construct
  source 1..110: mol_type = other DNA
gagcccttggaagctggagggaggagatgcatggttggtactcagagatgccagatccacctgactgaggtggggtttccttcagaatgaagggagttgggtgggggaca

SEQ ID NO: 76705 - DNA, 110 bp, synthetic construct
  source 1..110: mol_type = other DNA
gaggttgaactaactcgtttctctcacgtccttcaagctctgaaagactctgacggcacaggaagggggaggaaattgtattgaattgtattgcctgttgggttgaaaaa

SEQ ID NO: 76706 - DNA, 110 bp, synthetic construct
  source 1..110: mol_type = other DNA
gaagtggaagaggctttggaatgtcttcagggaaagagtacctgggctgggccagacagctcaggattcaaaccctggctcatcctctaactagctctgtgaccttggac

SEQ ID NO: 76707 - DNA, 110 bp, synthetic construct
  source 1..110: mol_type = other DNA
acagctcaggattcaaaccctggctcatcctctaactagctctgtgaccttggacaagatatgtagccctctctagggcttcctcttctgtaagatggggatagcaacac

SEQ ID NO: 76708 - DNA, 110 bp, synthetic construct
  source 1..110: mol_type = other DNA
tcgggcaattgtgcatgctgctgtctatcctgagatgcccttccctccattctttgctgggctggcttcttctcactgcccgggtcccagcttaagtgccccctccttcc

SEQ ID NO: 76709 - DNA, 110 bp, synthetic construct
  source 1..110: mol_type = other DNA
gctgggctggcttcttctcactgcccgggtcccagcttaagtgccccctccttccagaggcctcccagctcatctcagtctcccccgttagctctatctcagcactgctc

SEQ ID NO: 76710 - DNA, 110 bp, synthetic construct
  source 1..110: mol_type = other DNA
agggacaacctcaatctgaagcctgcagctccaaggcagccagtaattctaaccagcagggttggcccgagctctccctggggacctagccgtgtggaaccatctgggtg

SEQ ID NO: 76711 - DNA, 110 bp, synthetic construct
  source 1..110: mol_type = other DNA
gcagggttggcccgagctctccctggggacctagccgtgtggaaccatctgggtgacacccgctttaccaatgaggaaactgaggctcggcaaagcagggtgcctcgttc

SEQ ID NO: 76712 - DNA, 110 bp, synthetic construct
  source 1..110: mol_type = other DNA
agcagcaagggctcgaatagagcttcatgagacagacttcaacgggaagaagctgaagctgtatttcgcacaggtacttcatcgtgcaaaagccagtgttctctaaactt

SEQ ID NO: 76713 - DNA, 110 bp, synthetic construct
  source 1..110: mol_type = other DNA
aagctgtatttcgcacaggtacttcatcgtgcaaaagccagtgttctctaaacttggtttccttcttccagaaacactgccgctgctccattttctatgttattatatca

SEQ ID NO: 76714 - DNA, 110 bp, synthetic construct
  source 1..110: mol_type = other DNA
ggcttgggatccaggtctcctgggctctttctccaccagaatggtagagatagctgacaggttgggatatgggcggggcctcgccttgtgtctttggggaatagcagatt

SEQ ID NO: 76715 - DNA, 110 bp, synthetic construct
  source 1..110: mol_type = other DNA
gacaggttgggatatgggcggggcctcgccttgtgtctttggggaatagcagattttaagttcccaacctggggcagccctctgtgcacatagccacgccgccccctggt

SEQ ID NO: 76716 - DNA, 110 bp, synthetic construct
  source 1..110: mol_type = other DNA
cattagaccaccatcacagctggggtcctgcccttcagggttcatctgtccaccaggatagacgtaatatcggtcagaacacccccacacttcccgagggccccactaag

SEQ ID NO: 76717 - DNA, 110 bp, synthetic construct
  source 1..110: mol_type = other DNA
cctttgcacttgctaagactttttgtggaacccttttgccccagatcttcacatgactgattccattctattgctcctcaaatgtcccctctgcaaagaacacttcctca

SEQ ID NO: 76718 - DNA, 110 bp, synthetic construct
  source 1..110: mol_type = other DNA
actgattccattctattgctcctcaaatgtcccctctgcaaagaacacttcctcaaccacctgaagggagccctccatatcagtttgggctgctctaacaaactaccaca

SEQ ID NO: 76719 - DNA, 110 bp, synthetic construct
  source 1..110: mol_type = other DNA
gaggttaagtcattcattcaaagccacacagtcagtaggcatttgagccctatagcaccttctcacactttaatgtgcattttgatcacctggagagcttgttaaattgc

SEQ ID NO: 76720 - DNA, 110 bp, synthetic construct
  source 1..110: mol_type = other DNA
caccttctcacactttaatgtgcattttgatcacctggagagcttgttaaattgctgactttggagttcctgtcgtggctcaatggtaatgaacctaactagtatccatg

SEQ ID NO: 76721 - DNA, 110 bp, synthetic construct
  source 1..110: mol_type = other DNA
gtgcaagggcaacatcaagacaagcccccagcccatactcttcctcactcccagcctgatacacattcctgagctcctcctacattacattctggagtcatctctggtct

SEQ ID NO: 76722 - DNA, 110 bp, synthetic construct
  source 1..110: mol_type = other DNA
ggaggtgcacccgatcttccacatcttcatctctctgcctggggagctccaccacacctctgcacccccttcttattcaagttcccacctaaagccccttccttgggcag

SEQ ID NO: 76723 - DNA, 110 bp, synthetic construct
  source 1..110: mol_type = other DNA
taatcttttgattctcaagtcatggctcctaaggcaagaaagaattaggatgcccccaacccccagctggaacatgaagcaaataaaccatcaattatccctaactagga

SEQ ID NO: 76724 - DNA, 110 bp, synthetic construct
  source 1..110: mol_type = other DNA
aacctgaattgaatagaatgctggttgcagaagatcaagttaactgagcttgcctgtacaaaacacacttcgattcttaaaactagacaaggtttaaatcacaagatttt

SEQ ID NO: 76725 - DNA, 110 bp, synthetic construct
  source 1..110: mol_type = other DNA
gtacaaaacacacttcgattcttaaaactagacaaggtttaaatcacaagatttttcttcccctaataaactctaaactttcctccctggcgagaagatattccagattc

SEQ ID NO: 76726 - DNA, 110 bp, synthetic construct
  source 1..110: mol_type = other DNA
aagtgctcttacctcttacattgaagccctcccccccccccaagaaatcctgaagtgggcaaagcaggcattagcgaccccattttacagaaaaagagtgagaggctctg

SEQ ID NO: 76727 - DNA, 110 bp, synthetic construct
  source 1..110: mol_type = other DNA
ggacccctcccattcaacataaccctatgaggcaggtataactgtcttcatttctggatctggacaccaaggttaagcacctggcccaaggtcgcagaggtagtaaatgg

SEQ ID NO: 76728 - DNA, 110 bp, synthetic construct
  source 1..110: mol_type = other DNA
ggatctggacaccaaggttaagcacctggcccaaggtcgcagaggtagtaaatggcacagctgggcctcagacccaggtctgtctgaacctcaagtaaaaagctctgcac

SEQ ID NO: 76729 - DNA, 110 bp, synthetic construct
  source 1..110: mol_type = other DNA
aacccgaatcctcatggttcctagtaaggtttgttaactgctgacccatgaaagaaattcccttaaaatttgttttgaatgccctcaccttggagttctcttgtagagca

SEQ ID NO: 76730 - DNA, 110 bp, synthetic construct
  source 1..110: mol_type = other DNA
aattcccttaaaatttgttttgaatgccctcaccttggagttctcttgtagagcagctggttaaggatcctgtgtttcactgcagtggctctggtcgatgctgtgggcag

SEQ ID NO: 76731 - DNA, 110 bp, synthetic construct
  source 1..110: mol_type = other DNA
gagtggctagggaggggggcacagtgagaatggcttatgctggtcaactcgtgtaccagggtgcaacgggctgttctctttaaggaggtctactcctcggccttcctcag

SEQ ID NO: 76732 - DNA, 110 bp, synthetic construct
  source 1..110: mol_type = other DNA
ccagggtgcaacgggctgttctctttaaggaggtctactcctcggccttcctcagagctgagtggggccacgtggagcttgcaggaagctgatagtgggttggttgcaag

SEQ ID NO: 76733 - DNA, 110 bp, synthetic construct
  source 1..110: mol_type = other DNA
cccccgctctgccctcagggttgccccagggtccagccacttcgaactccctctgatcaggccacatggaggtatgctgaccgcagctctggctccaggaagtagggcct

SEQ ID NO: 76734 - DNA, 110 bp, synthetic construct
  source 1..110: mol_type = other DNA
atcaggccacatggaggtatgctgaccgcagctctggctccaggaagtagggcctctgcccctgctctccagcttagctccatcctcagacactgacccaccttagccac

SEQ ID NO: 76735 - DNA, 110 bp, synthetic construct
  source 1..110: mol_type = other DNA
gtgggtgttcaagtgtttatgggcccatcatagactgtggtccaatttaagtagaagctgtgagtagctctattaatgtagtcgagttgtgatacaggacattaaaaaaa

SEQ ID NO: 76736 - DNA, 110 bp, synthetic construct
  source 1..110: mol_type = other DNA
agctgtgagtagctctattaatgtagtcgagttgtgatacaggacattaaaaaaatacttgttttgggagttcttgctgtggcacaacccgattggcagcatcttaggag

SEQ ID NO: 76737 - DNA, 110 bp, synthetic construct
  source 1..110: mol_type = other DNA
acctctgcgccacgacgggaactccctaagtcctatttcttaacacctctggtatcagggcttaaataagagtaaaaagagtaaggcactcatttgcagcaacttgggtg

SEQ ID NO: 76738 - DNA, 110 bp, synthetic construct; identical to SEQ ID NO: 76737
  source 1..110: mol_type = other DNA

SEQ ID NO: 76739 - DNA, 110 bp, synthetic construct
  source 1..110: mol_type = other DNA
tcaggttcttaacatgctgagccacaacaggaatgccccaaataaggatattttaaaaaatggctaattcttactgtcactacttgtcttaacatgctgagccacaacag

SEQ ID NO: 76740 - DNA, 110 bp, synthetic construct; identical to SEQ ID NO: 76739
  source 1..110: mol_type = other DNA

SEQ ID NO: 76741 - DNA, 110 bp, synthetic construct
  source 1..110: mol_type = other DNA
acatgatgagtgccgtggaccggagcttcacagaccagagcaccctgcaggaggacgagcggctggggctctccttcatggacgcccatggctacagcccccggggtgag

SEQ ID NO: 76742 - DNA, 110 bp, synthetic construct
  source 1..110: mol_type = other DNA
cgagcggctggggctctccttcatggacgcccatggctacagcccccggggtgagtgcctgtcccttccttgtggcccccaggccctcctcctgagccaacagccaacag

SEQ ID NO: 76743 - DNA, 110 bp, synthetic construct
  source 1..110: mol_type = other DNA
ggctgattacaaatccaggcagcctctgccccccgccccccttgtttttgatccaaatggaggaggttttaggacaggacaatgaagctttgtgtgtttctcagcttgtg

SEQ ID NO: 76744 - DNA, 110 bp, synthetic construct
  source 1..110: mol_type = other DNA
aatggaggaggttttaggacaggacaatgaagctttgtgtgtttctcagcttgtgaggcctctcctcctggctcccctgcttccgtcctcatcccgttgattatcgccgg

SEQ ID NO: 76745 - DNA, 110 bp, synthetic construct
  source 1..110: mol_type = other DNA
tactcattgaccttgaaccagtgcccagcctctctggggctctggtttctcatctgttaaatgaaccaggttggacgagaggattgctaaggtgctttcagatttgatga

SEQ ID NO: 76746 - DNA, 110 bp, synthetic construct
  source 1..110: mol_type = other DNA
gttaaatgaaccaggttggacgagaggattgctaaggtgctttcagatttgatgagctgtatagctatgaacaaccccttatattaaaatttagcagagaggtagaaaga

SEQ ID NO: 76747 - DNA, 110 bp, synthetic construct
  source 1..110: mol_type = other DNA
cagccttcgttgcatccttaaagggtgcctgttatttctctgcatgtcaatctggccacatagctgggcggagaattcttcactttgccttcttttctggggtctcgtgt

SEQ ID NO: 76748 - DNA, 110 bp, synthetic construct
  source 1..110: mol_type = other DNA
ccacatagctgggcggagaattcttcactttgccttcttttctggggtctcgtgtggttcactgggtcctgctgatagttttggtttagggaaaagggcaagcttctcta

SEQ ID NO: 76749 - DNA, 110 bp, synthetic construct
  source 1..110: mol_type = other DNA
ctgggaactcctctgatcgcttgttctctcctcccatctctgtccatactttctccttcttggatcgcctcaaaccccatgtctacactatcagctcccaaatgtctgtc

SEQ ID NO: 76750 - DNA, 110 bp, synthetic construct
  source 1..110: mol_type = other DNA
cttcttggatcgcctcaaaccccatgtctacactatcagctcccaaatgtctgtctgcaacgtggacctgttccctcaacttcagacccagtatctccactcacatccca

SEQ ID NO: 76751 - DNA, 110 bp, synthetic construct
  source 1..110: mol_type = other DNA
ctccaattaacactccaaaaaaaaataagcagttttacagtttgggtagttaaaatttctggttctacatgaaaacacttcattttcagtctggctcagctaatgagtat

SEQ ID NO: 76752 - DNA, 110 bp, synthetic construct
  source 1..110: mol_type = other DNA
accaccttcccaaattcacctgcccaagccagaactgaagggcagagctggtctctctcagcccccaaattcactccactggcctccctgagacaagaccatgagtttgc

SEQ ID NO: 76753 - DNA, 110 bp, synthetic construct
  source 1..110: mol_type = other DNA
gcttggtcatgttggccacctgcctggtggcaaaacccacacctgagggcagagggaaggttatgagtacaagctggaacagacccggcagacagcaaacagctcttagg

SEQ ID NO: 76754 - DNA, 110 bp, synthetic construct
  source 1..110: mol_type = other DNA
aagccacaatctatcacctttccatctgactcttgtctttctctttgtaagtatgtgcaactttcattcatccttctgattgcacgcaccctccctggctgcttatgctc

SEQ ID NO: 76755 - DNA, 110 bp, synthetic construct
  source 1..110: mol_type = other DNA
tgcaactttcattcatccttctgattgcacgcaccctccctggctgcttatgctcactacatttggggaaagaagggcaaggggagggaatgtgagccctgtccattttc

SEQ ID NO: 76756 - DNA, 110 bp, synthetic construct; identical to SEQ ID NO: 76754
  source 1..110: mol_type = other DNA

SEQ ID NO: 76757 - DNA, 110 bp, synthetic construct; identical to SEQ ID NO: 76755
  source 1..110: mol_type = other DNA

SEQ ID NO: 76758 - DNA, 110 bp, synthetic construct
  source 1..110: mol_type = other DNA
gtgttgtttctccccttcttcccttccagggacaggtctggtcaggctatggccccttgcttatttctgactgtgagatggatacagaattgtatgacaataatgttaat

SEQ ID NO: 76759 - DNA, 110 bp, synthetic construct
  source 1..110: mol_type = other DNA
aaaaaaaaataataataagtttagtaatacccatgtttatggtgtgtgtgcacagggtgtcaaagaagctcagaagaggggtagggagggtgtcagaggcatgtggcaag

SEQ ID NO: 76760 - DNA, 110 bp, synthetic construct
  source 1..110: mol_type = other DNA
ggtgtcaaagaagctcagaagaggggtagggagggtgtcagaggcatgtggcaagtgtatgcaaagcagaagaatagcactcatctagggctgtcaaacagaatgatacg

SEQ ID NO: 76761 - DNA, 110 bp, synthetic construct
  source 1..110: mol_type = other DNA
attcctgcagggtctgcttctctagccttctcaagaatttgttacctgattccttgtatgaacccttttctgtttaaactagtcaccttcctatacctgaaccttgaata

SEQ ID NO: 76762 - DNA, 110 bp, synthetic construct
  source 1..110: mol_type = other DNA
ttcctgttttagatgtggaggagccccattgcatctggattgggtcttggttgaacatgcaagctagttaattcccaaaccagatagatatggaacagaaccattaaatc

SEQ ID NO: 76763 - DNA, 110 bp, synthetic construct
  source 1..110: mol_type = other DNA
tgggattccttctccaccgacccatctaaattctacctcttcgtggcccagctcaagcccgtaatacattctaacacttgcagtgtgaactgcatgagactgtcctccac

SEQ ID NO: 76764 - DNA, 110 bp, synthetic construct
  source 1..110: mol_type = other DNA
agcccgtaatacattctaacacttgcagtgtgaactgcatgagactgtcctccaccagacctctgtgagctccgcataaaaactgcacttcatctttgtattttgggggc

SEQ ID NO: 76765 - DNA, 110 bp, synthetic construct
  source 1..110: mol_type = other DNA
tgatgtccttgtcaaatagccagcgaggagctgaggacgtctaacagccacacaagtgggcttggatgtggatcctcctccaggtaagcattcacatgactgtggccctg

SEQ ID NO: 76766 - DNA, 110 bp, synthetic construct
  source 1..110: mol_type = other DNA
ccttgcctgtgtgatgcgcaggtgccagccagacattgtgggctgggactacacagctgagggcgatctttgaggatgcttgggctgctggggtcccttccagtgcccac

SEQ ID NO: 76767 - DNA, 110 bp, synthetic construct
  source 1..110: mol_type = other DNA
gctgagggcgatctttgaggatgcttgggctgctggggtcccttccagtgcccactgtccatggtgctgaccccccttcccatccacccccacctccccaacacaccctg

SEQ ID NO: 76768 - DNA, 110 bp, synthetic construct
  source 1..110: mol_type = other DNA
gatgggggaagggggaagagatgaccaggaggagctcttgggtaggagggcagtaggctgaagaagaccctgtgatgacacaggctctacgttccgagtggaagaggagg

SEQ ID NO: 76769 - DNA, 110 bp, synthetic construct
  source 1..110: mol_type = other DNA
aatgtcattaagccttgggtaccattcagggactattgcctgagatccatttaaaccttatagccagcattgcagtcttgtcatttgtcgctgtccacctcacagatgaa

SEQ ID NO: 76770 - DNA, 110 bp, synthetic construct
  source 1..110: mol_type = other DNA
ccttatagccagcattgcagtcttgtcatttgtcgctgtccacctcacagatgaaaaaccctctctcaactcttatcctttatcccacactgctccctgctccctaaacc

SEQ ID NO: 76771 - DNA, 110 bp, synthetic construct
  source 1..110: mol_type = other DNA
ccaagtgaaacaaggactgagcatttactagcaagtttagcaactaatgaggttgggctcgtgtgaaaagatagctgtgccaatcagattctctgattcaggaaatgtaa

SEQ ID NO: 76772 - DNA, 110 bp, synthetic construct
  source 1..110: mol_type = other DNA
ggctcgtgtgaaaagatagctgtgccaatcagattctctgattcaggaaatgtaacaaggaaatgcagagaggctgcagtagcaaacaaggggagccaatgtagaccatc

SEQ ID NO: 76773 - DNA, 110 bp, synthetic construct
  source 1..110: mol_type = other DNA
acaaacaaaaaaacccacacacacacaaaaaaaagaagggaccttctgtccccagtctgctgactttcgggtgaggaaggtacatcatttcagatgaaggctgtgcctcg

SEQ ID NO: 76774 - DNA, 110 bp, synthetic construct; identical to SEQ ID NO: 76773
  source 1..110: mol_type = other DNA

SEQ ID NO: 76775 - DNA, 110 bp, synthetic construct
  source 1..110: mol_type = other DNA
gtctgggttcccttgagatggccctctctcagggttaatgtgcctatgggtaggggcctggcttggctagagctcacagcttccaggtgaggcttccaggtatccactcc

SEQ ID NO: 76776 - DNA, 110 bp, synthetic construct
  source 1..110: mol_type = other DNA
ctcagggcaggcacacaccatggactgtttggtttgagtccagcgcctgtgctcatagccagcagggagctggatgtattggttgcagatgagaatgtgtgaatgcaagg

SEQ ID NO: 76777 - DNA, 110 bp, synthetic construct
  source 1..110: mol_type = other DNA
tagccagcagggagctggatgtattggttgcagatgagaatgtgtgaatgcaagggtgccaggaggtgggggcgtggctatgcaggtgtgagcacaggcgctctggcggc

SEQ ID NO: 76778 - DNA, 110 bp, synthetic construct
  source 1..110: mol_type = other DNA
cagagttcccttccgcttccaaaaggacaggatctgtccccccttctcttcactgtggccaaagcttccaggggccaccctaacatcaccctttgtgcaaaccctttggc

SEQ ID NO: 76779 - DNA, 110 bp, synthetic construct
  source 1..110: mol_type = other DNA
tggccaaagcttccaggggccaccctaacatcaccctttgtgcaaaccctttggctgaaatttgcatccagtctcctgggctggctgatctccagctggaggggcaggta

SEQ ID NO: 76780 - DNA, 110 bp, synthetic construct
  source 1..110: mol_type = other DNA
ctcagggcaaggttctgggaacacaaggagcagcctgccacttgtgcccatgagaaccctacctgaccgccgagaacttctttgctttggctttgtctaaaaacctctgg

SEQ ID NO: 76781 - DNA, 110 bp, synthetic construct
  source 1..110: mol_type = other DNA
accctacctgaccgccgagaacttctttgctttggctttgtctaaaaacctctggtacttggcaatcttctcatccagggcttgaatgacggccttggtgctgctccccg

SEQ ID NO: 76782 - DNA, 110 bp, synthetic construct
  source 1..110: mol_type = other DNA
tcacccagaccagcaacctgggggtcatcttagagtcctccttctccctcatcctctcatgacatcctactaactttacatcacaagtatatttccatccatcccctctt

SEQ ID NO: 76783 - DNA, 110 bp, synthetic construct
  source 1..110: mol_type = other DNA
ctcatgacatcctactaactttacatcacaagtatatttccatccatcccctcttctccttcgtaccttattttcagacctccatcatctcccatcagtccctctgcttc

SEQ ID NO: 76784 - DNA, 110 bp, synthetic construct; identical to SEQ ID NO: 76782
  source 1..110: mol_type = other DNA

SEQ ID NO: 76785 - DNA, 110 bp, synthetic construct; identical to SEQ ID NO: 76783
  source 1..110: mol_type = other DNA

SEQ ID NO: 76786 - DNA, 110 bp, synthetic construct
  source 1..110: mol_type = other DNA
gagacttggccagttgctatggtaacccagatggctgagtaaccattttgagggttgctatggtgacggggtgatgggctgcggggtagctgggatcttgtcttcctggg

SEQ ID NO: 76787 - DNA, 110 bp, synthetic construct
  source 1..110: mol_type = other DNA
tgctatggtgacggggtgatgggctgcggggtagctgggatcttgtcttcctgggtggctggcaccattcaggcctcttaaattagcagtgttgcactttctgaacagaa

SEQ ID NO: 76788 - DNA, 110 bp, synthetic construct
  source 1..110: mol_type = other DNA
ttgacctagagtcttgctttgaccaatagaatgctgtaggagtgatgctatgcagtttccaagcttaagccttaagaggccttgcaggttctatttttgtcctcttggaa

SEQ ID NO: 76789 - DNA, 110 bp, synthetic construct
  source 1..110: mol_type = other DNA
gtattttagtgaaagttggaactcagagaaaagagaaagctggctcagacttacacagtaagctagtggaaggggatgagaaaccaggctgaatccatatcacctgtctg

SEQ ID NO: 76790 - DNA, 110 bp, synthetic construct
  source 1..110: mol_type = other DNA
cagtaagctagtggaaggggatgagaaaccaggctgaatccatatcacctgtctggactacccactccaagtcatggctactcttgtccagcaaagacttccacccaccc

SEQ ID NO: 76791 - DNA, 110 bp, synthetic construct
  source 1..110: mol_type = other DNA
attacataccaggacaagtccaaatctcaaatgttttccctacaaatattaggtaaaacccttagctcttcttagtcagtaacctttcttgttccatctaccagaaacac

SEQ ID NO: 76792 - DNA, 110 bp, synthetic construct
  source 1..110: mol_type = other DNA
gttccattgcttacctttaagatgttggttcttgtccaataaagcccccttttggttttggcaagtgtactccaagaccttaagtgcaggaaaccgaataggtagcagga

SEQ ID NO: 76793 - DNA, 110 bp, synthetic construct
  source 1..110: mol_type = other DNA
ttttggcaagtgtactccaagaccttaagtgcaggaaaccgaataggtagcaggacaatgacagagaactttggagaaagtgtgtagaagctgagctgcacaggaagggg

SEQ ID NO: 76794 - DNA, 110 bp, synthetic construct
  source 1..110: mol_type = other DNA
aaagccaaatttatagcccagccaggaacagggtgtcagtggccggaaaattatcaagaggtgtttattgtttgttttttgtcttttcagggcgtacccgcagcatttgg

SEQ ID NO: 76795 - DNA, 110 bp, synthetic construct
  source 1..110: mol_type = other DNA
atgttgccggcagggtgggtggggctagctgtaggcaggtaagctttgagctcctgagtggaggcgtgactggaagaaggatagggagacaggtttgaaacaatgaggtg

SEQ ID NO: 76796 - DNA, 110 bp, synthetic construct
  source 1..110: mol_type = other DNA
gagtggaggcgtgactggaagaaggatagggagacaggtttgaaacaatgaggtgagggatgtgtttggctttgaaactgttcagtaccatttgattcctataagacatc

SEQ ID NO: 76797 - DNA, 110 bp, synthetic construct
  source 1..110: mol_type = other DNA
tatgccttatattgttttctatttcctgttggaattaagaagtaagctactgcttattctaatttttgaaatcgatgagaactaggtaatatggctgaaaaagagcatct

SEQ ID NO: 76798 - DNA, 110 bp, synthetic construct; identical to SEQ ID NO: 76797
  source 1..110: mol_type = other DNA

SEQ ID NO: 76799 - DNA, 110 bp, synthetic construct
  source 1..110: mol_type = other DNA
ccccttgagatatacccaggtgggaaactgctggtccctctgtgtttaagcttttgcagaaccgtggtgggactgtccgcaggttcctcactggctgctcagctccccgc

SEQ ID NO: 76800 - DNA, 110 bp, synthetic construct
  source 1..110: mol_type = other DNA
gcagaaccgtggtgggactgtccgcaggttcctcactggctgctcagctccccgcgaagcacctgtgccccatgagtttctcgtggtttctgccatgtaagaaatgactt

SEQ ID NO: 76801 - DNA, 110 bp, synthetic construct
  source 1..110: mol_type = other DNA
ttccgtcctctgtgccttgagaactgcctaacttgctcgtgtgccagcttccttgtctgtgaaaggagaataaacgcctctgaagggcaagttctgtgctgggcagtctt

SEQ ID NO: 76802 - DNA, 110 bp, synthetic construct
  source 1..110: mol_type = other DNA
gattcctgctctgggcctccaccccgtggacagggttcagctttaaaaaccaagcaactctcaaagaagccggtgaggtgggatttggttgcaagacctggagcctggag

SEQ ID NO: 76803 - DNA, 110 bp, synthetic construct
  source 1..110: mol_type = other DNA
gtagcagctggtctacgtggtctgtttacaaccacccaagttgcttaaacatgcagatgtttctggcatgtgaatgatcttgaattagtgacagaagtataaccaaatag

SEQ ID NO: 76804 - DNA, 110 bp, synthetic construct
  source 1..110: mol_type = other DNA
ttgctcttaaaagccccagataagatgctggcaaactcagagttcaaatgaccgcgtatcactctttgctttgctgcattaagcagaatcctttttgctcatttccatct

SEQ ID NO: 76805 - DNA, 110 bp, synthetic construct
  source 1..110: mol_type = other DNA
gtatcactctttgctttgctgcattaagcagaatcctttttgctcatttccatctgtcaaggacaagagcatgtgcattcgcaggaataaagtgtgaaatgtattttatt

SEQ ID NO: 76806 - DNA, 110 bp, synthetic construct
  source 1..110: mol_type = other DNA
acgactacaggacctggagaggccatattcagaccctaatgaggcattacccagggaacctggactcatgggacagttggccgcatgatgtcactctggatgtcatagct

SEQ ID NO: 76807 - DNA, 110 bp, synthetic construct
  source 1..110: mol_type = other DNA
gaacctggactcatgggacagttggccgcatgatgtcactctggatgtcatagctagaagtggtcttggatccactggagaggagggtctgtgagtgaatttatggttgg

SEQ ID NO: 76808 - DNA, 110 bp, synthetic construct
  source 1..110: mol_type = other DNA
tgctgcccagccttcatggactgggccccacgtcaaccagggtctcatcaaaatctcgacatctgcgatgctgcaaagttggatgcatccagaaacccttaagctcagcg

SEQ ID NO: 76809 - DNA, 110 bp, synthetic construct
  source 1..110: mol_type = other DNA
tcgacatctgcgatgctgcaaagttggatgcatccagaaacccttaagctcagcgagatgaagggcagcaccgggggtttgcccatctgcggctcagagcacactgcttc

SEQ ID NO: 76810 - DNA, 110 bp, synthetic construct; identical to SEQ ID NO: 76808
  source 1..110: mol_type = other DNA

SEQ ID NO: 76811 - DNA, 110 bp, synthetic construct; identical to SEQ ID NO: 76809
  source 1..110: mol_type = other DNA

SEQ ID NO: 76812 - DNA, 110 bp, synthetic construct
  source 1..110: mol_type = other DNA
gagatcttaaacttgaatgtttgaggccaattgtggagactgctagaaagccctaacttaacacagaaggcacaagctgttcggaagaaagcctgtgtgttctggtctcc

SEQ ID NO: 76813 - DNA, 110 bp, synthetic construct
  source 1..110: mol_type = other DNA
acttaacacagaaggcacaagctgttcggaagaaagcctgtgtgttctggtctccctcccatctaggtgtggcactgtggttatgtactacctgaatgggatgttggcag

SEQ ID NO: 76814 - DNA, 110 bp, synthetic construct
  source 1..110: mol_type = other DNA
gaggccagccataatgtttaaaacctttcattttcaagcttaacacatggtgttttcccaacctttctttccctggcatggactccatgtgttttcctatattgggtatt

SEQ ID NO: 76815 - DNA, 110 bp, synthetic construct
  source 1..110: mol_type = other DNA
tcccaacctttctttccctggcatggactccatgtgttttcctatattgggtatttactgttgtacaacatcatggctgaaaaagcatttcattatttttttaatttttt

SEQ ID NO: 76816 - DNA, 110 bp, synthetic construct
  source 1..110: mol_type = other DNA
tacacagtcaccagcatagaatgacagaatccttcccatctggccaactttctggaggccgtcttgctgaagcgctgttctgtctctggccagctccatctctcaccaat

SEQ ID NO: 76817 - DNA, 110 bp, synthetic construct
  source 1..110: mol_type = other DNA
aggccgtcttgctgaagcgctgttctgtctctggccagctccatctctcaccaatggttaatgatcaaaatcaaagatacttctcattcgtgtaagacacactcaataca

SEQ ID NO: 76818 - DNA, 110 bp, synthetic construct
  source 1..110: mol_type = other DNA
cagtttgactgtttttgtcagagctttagtatttggggtctggctgaagcaaagtgaaatggtaccctgctggctagagttcagcattcaacgtttttgcagaggtcttt

SEQ ID NO: 76819 - DNA, 110 bp, synthetic construct
  source 1..110: mol_type = other DNA
tttgttactgctgagccacagtgggaactccctagaaatgacaatctttgatgtcacatagcttgacaattacagtatttgctattcttgatgcagctgggcacacattt

SEQ ID NO: 76820 - DNA, 110 bp, synthetic construct
  source 1..110: mol_type = other DNA
acatagcttgacaattacagtatttgctattcttgatgcagctgggcacacattttggtcacaaattctaggtcatgacttaggtggatgattaataagagggatgctgg

SEQ ID NO: 76821 - DNA, 110 bp, synthetic construct
  source 1..110: mol_type = other DNA
gttgtcctaatatgggtgtggtggttctggacagaaagaatgttgaattgcaatgtattggggccttctgagaggacacagacaggaatataaaaaggaaagctaggttt

SEQ ID NO: 76822 - DNA, 110 bp, synthetic construct
  source 1..110: mol_type = other DNA
tattggggccttctgagaggacacagacaggaatataaaaaggaaagctaggtttgccagaaaaaaaaaagcaaattaggattctgcaggactcttgttattttgtcatg

SEQ ID NO: 76823 - DNA, 110 bp, synthetic construct
  source 1..110: mol_type = other DNA
ggcaggtcctcttgtgttattacctccctgctcaggatgctgaaaacgcacacagagctggaattgcccgctcgtatagctgaatttgaaactggcactctggcatcaag

SEQ ID NO: 76824 - DNA, 110 bp, synthetic construct
  source 1..110: mol_type = other DNA
agctggaattgcccgctcgtatagctgaatttgaaactggcactctggcatcaagtccaaatgtttaacaacttcccccttttgtctcttaaggaaaaacagtatttgat

SEQ ID NO: 76825 - DNA, 110 bp, synthetic construct
  source 1..110: mol_type = other DNA
acctcacactgcaaagacactgaccatctccagggcttcatctgcctgactgtgggggaaaattcggccctgtgggatcacttccaccctcttgagaagctgtaccttgg

SEQ ID NO: 76826 - DNA, 110 bp, synthetic construct
  source 1..110: mol_type = other DNA
gggaaaattcggccctgtgggatcacttccaccctcttgagaagctgtaccttggcttcctggtcatggtgctctcctggactttcttctctctgttcccatcttccttc

SEQ ID NO: 76827 - DNA, 110 bp, synthetic construct
  source 1..110: mol_type = other DNA
ctctgagtgtcacccccacttcacattgcaactcagaactttcctcttggagttgctttttcaccccctgccaaactcctctgctgtccaaggaaagctgggctctgggc

SEQ ID NO: 76828 - DNA, 110 bp, synthetic construct
  source 1..110: mol_type = other DNA
ctttttcaccccctgccaaactcctctgctgtccaaggaaagctgggctctgggctctcactctctgccctgtgcattcccaaggtcaggtgccctcagaaggacacgcg

SEQ ID NO: 76829 - DNA, 110 bp, synthetic construct
  source 1..110: mol_type = other DNA
tagtaggcagcactcttggaatgtcggtcttgggggagttctctgtgacaccatccaccacaatttcttttgttgattgtaacggtgagattcatctgtgttgttgagtg

SEQ ID NO: 76830 - DNA, 110 bp, synthetic construct
  source 1..110: mol_type = other DNA
caccacaatttcttttgttgattgtaacggtgagattcatctgtgttgttgagtgtagctattaatagttcttattatgtgaccacattgaaatttattattggttctgt

SEQ ID NO: 76831 - DNA, 110 bp, synthetic construct
  source 1..110: mol_type = other DNA
ttccgggtagttactatttatcctcttgaagctgaggttgccaacatcttgcaagaaagaattacttcagaacacaaagtgtctcctccaactgagaatgaatgcagaca

SEQ ID NO: 76832 - DNA, 110 bp, synthetic construct
  source 1..110: mol_type = other DNA
cgcctagagttcctgactggctcacactagaaaagcactccttggcttgaacggacaaattttgtcatcctccttccttttccaaagctgggactgactttcctaggaac

SEQ ID NO: 76833 - DNA, 110 bp, synthetic construct
  source 1..110: mol_type = other DNA
caaattttgtcatcctccttccttttccaaagctgggactgactttcctaggaacagacaagccctttaattcccaggttagcactccacccgtacaccacaccaaacat

SEQ ID NO: 76834 - DNA, 110 bp, synthetic construct
  source 1..110: mol_type = other DNA
ttcaaccactgacatctatctaacagccactttgatacaataagtgatgtgacaactttagggtcttggtgaaatttatgctgcaaaacaggctcatttagagctgttct

SEQ ID NO: 76835 - DNA, 110 bp, synthetic construct
  source 1..110: mol_type = other DNA
ctttagggtcttggtgaaatttatgctgcaaaacaggctcatttagagctgttctccagataatataggagtcaaagactgatggtggtatcgagggctgacagaatcag

SEQ ID NO: 76836 - DNA, 110 bp, synthetic construct
  source 1..110: mol_type = other DNA
catgacttctgagtggactccggccactagtgaaggcagatcaaatcacagcctgctttgtggttaagagcaacttagggcaacttgttgacatcattaaggtgtagctg

SEQ ID NO: 76837 - DNA, 110 bp, synthetic construct
  source 1..110: mol_type = other DNA
ctttgtggttaagagcaacttagggcaacttgttgacatcattaaggtgtagctgagcgttcccatcgtggtacagcgtaaataaatccagctaggaaccagaaggttga

SEQ ID NO: 76838 - DNA, 110 bp, synthetic construct
  source 1..110: mol_type = other DNA
ctggcttgtgttttagagagatccccacagccccatgtactgatctcagcaccttccctctcagcactggcagagggacagcgagccgctggagctgacacctcacatta

SEQ ID NO: 76839 - DNA, 110 bp, synthetic construct
  source 1..110: mol_type = other DNA
ccctctcagcactggcagagggacagcgagccgctggagctgacacctcacattatttgtattctgatctttgtaaaaagatgcctggtccatacagcccatgacagaga

SEQ ID NO: 76840 - DNA, 110 bp, synthetic construct; identical to SEQ ID NO: 76838
  source 1..110: mol_type = other DNA

SEQ ID NO: 76841 - DNA, 110 bp, synthetic construct; identical to SEQ ID NO: 76839
  source 1..110: mol_type = other DNA

SEQ ID NO: 76842 - DNA, 110 bp, synthetic construct
  source 1..110: mol_type = other DNA
cttgctgtataattgggatggaacttgaattctctttgactggggccctaggaaccttctcctgacagatgcttctcctgttcgagatttttaagctgttggctggtatc

SEQ ID NO: 76843 - DNA, 110 bp, synthetic construct
  source 1..110: mol_type = other DNA
cttctcctgacagatgcttctcctgttcgagatttttaagctgttggctggtatcttgcatcatcctgagcatattactttttatccagaacttactccttacaacctgc

SEQ ID NO: 76844 - DNA, 110 bp, synthetic construct; identical to SEQ ID NO: 76842
  source 1..110: mol_type = other DNA

SEQ ID NO: 76845 - DNA, 110 bp, synthetic construct; identical to SEQ ID NO: 76843
  source 1..110: mol_type = other DNA

SEQ ID NO: 76846 - DNA, 110 bp, synthetic construct
  source 1..110: mol_type = other DNA
ttataagacatgaataacaagaactcacatttgttccagcccccagttatgccttgatagatcctttggtttatcaaagattcatctctagttctaccaggcaacaactc

SEQ ID NO: 76847 - DNA, 110 bp, synthetic construct
  source 1..110: mol_type = other DNA
ccagcccccagttatgccttgatagatcctttggtttatcaaagattcatctctagttctaccaggcaacaactcgtgtgtataagccaacatatgcatcaggagatgaa

SEQ ID NO: 76848 - DNA, 110 bp, synthetic construct
  source 1..110: mol_type = other DNA
gtgggtgtgtttccaggggagtgagaacaacaggcatttctcagttgcagtgacttctttatgtactgacctctgtggtgactggggccacaggtggagcctgttcacag

SEQ ID NO: 76849 - DNA, 110 bp, synthetic construct
  source 1..110: mol_type = other DNA
tgaaaatgcatgtgaggaaaatatctgaggctgaggaaagaaccacttgaaaggataagaagtaatagtaccaagaattcacatagaacaaggaataagtcctgtttata

SEQ ID NO: 76850 - DNA, 110 bp, synthetic construct
  source 1..110: mol_type = other DNA
atgccaccctcctcccctggccctcaactcaggcctttcacacggatgctgatcccagttgcacctgtattcaactgcacctgaatccacaatatccccacaatccacct

SEQ ID NO: 76851 - DNA, 110 bp, synthetic construct
  source 1..110: mol_type = other DNA
cagttgcacctgtattcaactgcacctgaatccacaatatccccacaatccacctgaatccttgaacctgaactgttagcgtttgcagcatgggtgtgttcctctgacct

SEQ ID NO: 76852 - DNA, 110 bp, synthetic construct
  source 1..110: mol_type = other DNA
tagtgttggaatgaacattggggtgcatgtgttatggtttagaattagaattatggttttctctgatatatgcccaggagtggaattgatggatcatatggtagttctat

SEQ ID NO: 76853 - DNA, 110 bp, synthetic construct; identical to SEQ ID NO: 76852
  source 1..110: mol_type = other DNA

SEQ ID NO: 76854 - DNA, 110 bp, synthetic construct
  source 1..110: mol_type = other DNA
atccacgtcatagtgttaatgtgatgattaaatgaaagaatccatgtccagctcctggcacatgataaatgctcaatgaccattcattgttttcttgttgtggttgctac

SEQ ID NO: 76855 - DNA, 110 bp, synthetic construct
  source 1..110: mol_type = other DNA
tggcacatgataaatgctcaatgaccattcattgttttcttgttgtggttgctactgtttattatcgttatatcacatggtaactaagagtactgcctctgctacttatt

SEQ ID NO: 76856 - DNA, 110 bp, synthetic construct
  source 1..110: mol_type = other DNA
cacagttctggggctaaagtctgagatcaaggtgtcagcagggttggttccttctaaggctgtgagggagaatcttttcatgtctctctcctagcttcttatggttcgct

SEQ ID NO: 76857 - DNA, 110 bp, synthetic construct
  source 1..110: mol_type = other DNA
aaggctgtgagggagaatcttttcatgtctctctcctagcttcttatggttcgctggccatctttggtgttctttggctgacagatgcatcaccccaatctctgccttct

SEQ ID NO: 76858 - DNA, 110 bp, synthetic construct
  source 1..110: mol_type = other DNA
tgttgaacattaactggggctcctgttggggctttgttaacacatggtctgtggggccgggctgtgcgtggtctccccgcctggatgagtgatcgccaaggtccatccca

SEQ ID NO: 76859 - DNA, 110 bp, synthetic construct
  source 1..110: mol_type = other DNA
gggtggaagcaagaatggccccgcttaccattactctcaactatccacctgtgtttcctgtccctgcagctctaggctctgccaatttaaaagtcctagtttccaggagt

SEQ ID NO: 76860 - DNA, 110 bp, synthetic construct
  source 1..110: mol_type = other DNA
taccattactctcaactatccacctgtgtttcctgtccctgcagctctaggctctgccaatttaaaagtcctagtttccaggagttcctgtcatggctcagtggttaacg

SEQ ID NO: 76861 - DNA, 110 bp, synthetic construct
  source 1..110: mol_type = other DNA
acaagggcctcagtgtccttctctttaggtagagagatctttcttgagcagctgtgtacagtatcttccggtgattgatcagtggttcacatctcaactagtttggactt

SEQ ID NO: 76862 - DNA, 110 bp, synthetic construct
  source 1..110: mol_type = other DNA
gtacagtatcttccggtgattgatcagtggttcacatctcaactagtttggacttgaatttcctctcctcatgctttaaacaaaacctgttttttggtttgtttgtttgt

SEQ ID NO: 76863 - DNA, 110 bp, synthetic construct
  source 1..110: mol_type = other DNA
tacagcccttaaaaaaatttcaaggggtgggagagtgatctgctgtgcttcaggaatattttattgtcaagtctggctgcttccctgcaaggtcttgatggcattttcag

SEQ ID NO: 76864 - DNA, 110 bp, synthetic construct
  source 1..110: mol_type = other DNA
atattttattgtcaagtctggctgcttccctgcaaggtcttgatggcattttcagcttaccgtggggaatagatctggggtttgcttaccatcagcaggatatacacaca

SEQ ID NO: 76865 - DNA, 110 bp, synthetic construct
  source 1..110: mol_type = other DNA
aggtcgactctcatactgcatcttgaccttggttcagaacaggagagaatattccttttgggaatgaagtaagaacccaataatgtttattcttagcagtgcagatcttt

SEQ ID NO: 76866 - DNA, 110 bp, synthetic construct
  source 1..110: mol_type = other DNA
ttttgggaatgaagtaagaacccaataatgtttattcttagcagtgcagatctttgaggacgggaacgatgtgattggaaagtatttttgggagttcccatcgtggcaca

SEQ ID NO: 76867 - DNA, 110 bp, synthetic construct; identical to SEQ ID NO: 76865
  source 1..110: mol_type = other DNA

SEQ ID NO: 76868 - DNA, 110 bp, synthetic construct; identical to SEQ ID NO: 76866
  source 1..110: mol_type = other DNA

SEQ ID NO: 76869 - DNA, 110 bp, synthetic construct
  source 1..110: mol_type = other DNA
tggaaagctgaggaagggaggcaacactagctgaccaaaatggggaccatctctcttgccacccttggagtctgtctggtgttgggtactgagatcttacctgtttgctt

SEQ ID NO: 76870 - DNA, 110 bp, synthetic construct
  source 1..110: mol_type = other DNA
tcttttgtacaagtcgattctcatctgtagcacctccccactgcccagtctaacacagtcactgcccaatgtcagtctggatcacatcacccagttttagtttctttata

SEQ ID NO: 76871 - DNA, 110 bp, synthetic construct
  source 1..110: mol_type = other DNA
cagtcactgcccaatgtcagtctggatcacatcacccagttttagtttctttatagcatttattgtgactcagagaatctggtttgctggtttcattgcttaatttgtct

SEQ ID NO: 76872 - DNA, 110 bp, synthetic construct
  source 1..110: mol_type = other DNA
gaattagcaaagacttccagaccttcacagccaaattcttctttttccctatagagatgctctcagatgtagcagaactcttttttaattgcagaataaaagatgctttc

SEQ ID NO: 76873 - DNA, 110 bp, synthetic construct
  source 1..110: mol_type = other DNA
gatgctctcagatgtagcagaactcttttttaattgcagaataaaagatgctttcaacctcatccaagcctgagatccatcatccaatgaccccatgacctcagaacact

SEQ ID NO: 76874 - DNA, 110 bp, synthetic construct
  source 1..110: mol_type = other DNA
tgaatatgtccaagaggacctaaagatctcaaactgatgatccttgagcctggtacagcctgtacggttttagaaaaactcatgtggaccaacatttaagagcttggaga

SEQ ID NO: 76875 - DNA, 110 bp, synthetic construct
  source 1..110: mol_type = other DNA
cagcctgtacggttttagaaaaactcatgtggaccaacatttaagagcttggagacttcatattcaattttgaatttcaagtttgtctaaaataatagaagctcaggcac

SEQ ID NO: 76876 - DNA, 110 bp, synthetic construct
  source 1..110: mol_type = other DNA
atccccggtctgttcaccacagcagacccagtgcctagcacacagtatggatcaatatatattaatcaaagagataaatatcaaagttttccttaggcctaggtaagatt

SEQ ID NO: 76877 - DNA, 110 bp, synthetic construct
  source 1..110: mol_type = other DNA
gaagccagataatatgctaagaggatactccagcagctctatggagcttcataaggctgcagctctggttgataccttgactgcagttccatgggtgatcctggcccagg

SEQ ID NO: 76878 - DNA, 110 bp, synthetic construct
  source 1..110: mol_type = other DNA
gctgcagctctggttgataccttgactgcagttccatgggtgatcctggcccaggaccatctagttagccaatccagagttccccacagacactgtgtgagatgataaat

SEQ ID NO: 76879 - DNA, 110 bp, synthetic construct; identical to SEQ ID NO: 76877
  source 1..110: mol_type = other DNA

SEQ ID NO: 76880 - DNA, 110 bp, synthetic construct; identical to SEQ ID NO: 76878
  source 1..110: mol_type = other DNA

SEQ ID NO: 76881 - DNA, 110 bp, synthetic construct
  source 1..110: mol_type = other DNA
ggatgagtcttttattctctgtaagcctcaaatatcttatctgaaaaatgaccggtttcatctagaaaatagtttccagtctcatgatgtaagtgtataaatggatggga

SEQ ID NO: 76882 - DNA, 110 bp, synthetic construct
  source 1..110: mol_type = other DNA
ggaccaaatattatttggcagctattaaccatttggtggcaagacttagaggacttctcagggtcttggaacaacagaagggtacttaagaggctcaggcaagtggattt

SEQ ID NO: 76883 - DNA, 110 bp, synthetic construct
  source 1..110: mol_type = other DNA
aagttcaccctgaagttcagtcatcacctccaccgtacatgtcagcgagcttcttgaaacgtggcccccaatcgttcaggtaatcatagtcctgctcacctccactactg

SEQ ID NO: 76884 - DNA, 110 bp, synthetic construct
  source 1..110: mol_type = other DNA
gaaacgtggcccccaatcgttcaggtaatcatagtcctgctcacctccactactggaggaattaagggagctcaaggacccagcggtagagccactgccttcatagtcaa

SEQ ID NO: 76885 - DNA, 110 bp, synthetic construct
  source 1..110: mol_type = other DNA
ctgcaaaggcttgtggggaaggccaagtatgaatgtgctggttgcatatccaaacccatgagggagaagctctcagtgggaggttaaatttcatagtttgtatttacctg

SEQ ID NO: 76886 - DNA, 110 bp, synthetic construct
  source 1..110: mol_type = other DNA
ccatgagggagaagctctcagtgggaggttaaatttcatagtttgtatttacctggggggtggggatccacctgtatactctgggttttctttcaggaggttggcatgtg

SEQ ID NO: 76887 - DNA, 110 bp, synthetic construct
  source 1..110: mol_type = other DNA
cttaactttcaaaaattttaagttaaaaaaaaatacgtctgcctaccttaatgctattaacccttgtacagcaaaacccttccgatcctctccataacatagaatttctc

SEQ ID NO: 76888 - DNA, 110 bp, synthetic construct
  source 1..110: mol_type = other DNA
attaacccttgtacagcaaaacccttccgatcctctccataacatagaatttctccatttttgagttatgttcatttttctttcagctgagacatattctcctttgatat

SEQ ID NO: 76889 - DNA, 110 bp, synthetic construct
  source 1..110: mol_type = other DNA
ctcatggattatctatctcctggatctttgtttctgagtgatagttctgtaagtggctcctgtgtggagaaattcctttgttgtagtttatagttggttccctagccaca

SEQ ID NO: 76890 - DNA, 110 bp, synthetic construct
  source 1..110: mol_type = other DNA
gctcctgtgtggagaaattcctttgttgtagtttatagttggttccctagccacagttttactccagagtattttccaaagtgttgtggattttttagcttctttctctg

SEQ ID NO: 76891 - DNA, 110 bp, synthetic construct
  source 1..110: mol_type = other DNA
agggaattcagacaaagtatcttgctatgtgtagaacaattagtttagcttctaataattgcagtgtgttttgtttacctagctctttactcagaagcatggcacaatta

SEQ ID NO: 76892 - DNA, 110 bp, synthetic construct
  source 1..110: mol_type = other DNA
taattgcagtgtgttttgtttacctagctctttactcagaagcatggcacaattaatacatattatctagcttacccttggaactggtttcagaaaaattaatcacccat

SEQ ID NO: 76893 - DNA, 110 bp, synthetic construct
  source 1..110: mol_type = other DNA
ttcacctctgtatttccctgcagagggacatctgttataacttccagtcaccatatctctattcatgaatctgcttcccacacttcatgagtctgaatcaggagatggac

SEQ ID NO: 76894 - DNA, 110 bp, synthetic construct
  source 1..110: mol_type = other DNA
tctctattcatgaatctgcttcccacacttcatgagtctgaatcaggagatggacatctgtgcccttagttagcaattttaaaaccacaagtacaaaaaaagtcctattg

SEQ ID NO: 76895 - DNA, 110 bp, synthetic construct
  source 1..110: mol_type = other DNA
caaaagcagttacaaactacacctcttaattacagccaatcattctagaatactcagggcagctagcctctttagtgatagaaagaatgtgactcattctacagtcaagg

SEQ ID NO: 76896 - DNA, 110 bp, synthetic construct
  source 1..110: mol_type = other DNA
agggcagctagcctctttagtgatagaaagaatgtgactcattctacagtcaaggaaaatggctgttcaactgcttactttataaatttgtaggagttcccatcgtggct

SEQ ID NO: 76897 - DNA, 110 bp, synthetic construct
  source 1..110: mol_type = other DNA
agggtgctggtgaatccaagtgtcctctgatggtcaaagtcctggatgctgtccgaggcagtccggccgtgaacgtaggcgtgaaagtgttcaaaaaggctgctgatggg

SEQ ID NO: 76898 - DNA, 110 bp, synthetic construct
  source 1..110: mol_type = other DNA
aggcagtccggccgtgaacgtaggcgtgaaagtgttcaaaaaggctgctgatgggacttgggagccctttgccttggggtaagtggccccctccccaggaaacgcagagg

SEQ ID NO: 76899 - DNA, 110 bp, synthetic construct
  source 1..110: mol_type = other DNA
ttctacgtttttgtcactgaactagaaatgcatctgtagaccatcagttacaacttttattaaaactatcagcatattattagtttattgtttgttagctttgtgggctc

SEQ ID NO: 76900 - DNA, 110 bp, synthetic construct
  source 1..110: mol_type = other DNA
tttattaaaactatcagcatattattagtttattgtttgttagctttgtgggctcctttaccaggattttaccctcataatggcttgcttttattatatttgcatcccca

SEQ ID NO: 76901 - DNA, 110 bp, synthetic construct
  source 1..110: mol_type = other DNA
tttgctttttaagagacataacgttacctctcattttatttaaatggtgatctttagctcttccatttccctggttgctttgatttttgaggttattctttgagtgccct

SEQ ID NO: 76902 - DNA, 110 bp, synthetic construct; identical to SEQ ID NO: 76901
  source 1..110: mol_type = other DNA

SEQ ID NO: 76903 - DNA, 110 bp, synthetic construct
  source 1..110: mol_type = other DNA
gaagcacttttgattacgtattttttatgtcctaactactctgaattgtattttgggattgtggaaaggtaaatcctatgtgtttattgcataattttctcttcctgagc

SEQ ID NO: 76904 - DNA, 110 bp, synthetic construct; identical to SEQ ID NO: 76903
  source 1..110: mol_type = other DNA

SEQ ID NO: 76905 - DNA, 110 bp, synthetic construct
  source 1..110: mol_type = other DNA
gaaatgccagatatttctacagccgacactcaagaaatggagaatgagtgatgccattaataacacccaattatggttaaaaggaaactagttagacataaaaaacagta

SEQ ID NO: 76906 - DNA, 110 bp, synthetic construct
  source 1..110: mol_type = other DNA
gaagccatctgcccattccttcagaagcaggggctgcttcactaaaactgcaaatccagctatctcactggcctatctttttagaataaaggcagttctctggccactgg

SEQ ID NO: 76907 - DNA, 110 bp, synthetic construct
  source 1..110: mol_type = other DNA
ccagctatctcactggcctatctttttagaataaaggcagttctctggccactggctgaaaagcctttgtccttgctcctcctgcaccaggctgtttccttagactggct

SEQ ID NO: 76908 - DNA, 110 bp, synthetic construct
  source 1..110: mol_type = other DNA
tagggaatattttatccagcctggaccttccctgatggtcgaagattttcaataactcattcttcccaatgcctctgtgatagcttcctcactgtggaagccaccccagc

SEQ ID NO: 76909 - DNA, 110 bp, synthetic construct
  source 1..110: mol_type = other DNA
tattatatcctgaagtcttacctgccaaagcatactgtggtgcctgaaaacacctgctcaccattatttacatgcagatatcctttcaaacactcaactgcctccctcac

SEQ ID NO: 76910 - DNA, 110 bp, synthetic construct; identical to SEQ ID NO: 76909
  source 1..110: mol_type = other DNA

SEQ ID NO: 76911 - DNA, 110 bp, synthetic construct
  source 1..110: mol_type = other DNA
cctctacccacttggactccggctccggcttgtgctcccggcgcccgggacgctgaagccggctggggtggaaagaaagcagattattctgagctgaagtggttcttctt

SEQ ID NO: 76912 - DNA, 110 bp, synthetic construct
  source 1..110: mol_type = other DNA
aagccggctggggtggaaagaaagcagattattctgagctgaagtggttcttcttcagggagcaccctgagtgcagggagagggctacttagcgactccccactcttgtt

SEQ ID NO: 76913 - DNA, 110 bp, synthetic construct
  source 1..110: mol_type = other DNA
tactcctccatctttctctgtgaacattccaaagcttaaaatagaatttaaaaacaaaaacaaaaaccccaagttgcttttagtcctcactcacttaaactgttctcgta

SEQ ID NO: 76914 - DNA, 110 bp, synthetic construct
  source 1..110: mol_type = other DNA
aaaaacaaaaaccccaagttgcttttagtcctcactcacttaaactgttctcgtagataataaatttgaagcccttatttcttaaatgatttcatctctaccatgtaggt

SEQ ID NO: 76915 - DNA, 110 bp, synthetic construct
  source 1..110: mol_type = other DNA
accacctcactgatcacctgggttgctgaagggcattttccttcttcctttgcatcaaaggtaagctacctccctgccctcatccagggctagagctgctacctgcattt

SEQ ID NO: 76916 - DNA, 110 bp, synthetic construct
  source 1..110: mol_type = other DNA
caaaggtaagctacctccctgccctcatccagggctagagctgctacctgcattttgccttccagactcctccagccaaactgcagcaagctggttccttgaagaatgga

SEQ ID NO: 76917 - DNA, 110 bp, synthetic construct
  source 1..110: mol_type = other DNA
ctaagactgagaccaagagcttagatgatgatcctacagtgaacaccagcttagccctctggtactaatacactctggcaagaaggagccagacttatgctccaggtagg

SEQ ID NO: 76918 - DNA, 110 bp, synthetic construct
  source 1..110: mol_type = other DNA
cctctggtactaatacactctggcaagaaggagccagacttatgctccaggtagggatgaaagaagatcccagaatgactttgggagatctgagggtgagggctgagagg

SEQ ID NO: 76919 - DNA, 110 bp, synthetic construct; identical to SEQ ID NO: 76917
  source 1..110: mol_type = other DNA

SEQ ID NO: 76920 - DNA, 110 bp, synthetic construct; identical to SEQ ID NO: 76918
  source 1..110: mol_type = other DNA

SEQ ID NO: 76921 - DNA, 110 bp, synthetic construct
  source 1..110: mol_type = other DNA
aatattttagttgcagtcactggatgggttgtttatccatggtgtatataattactgttttttcattgcttctaaaaagtaatcatcctcagaaataaggatgcaaaata

SEQ ID NO: 76922 - DNA, 110 bp, synthetic construct
  source 1..110: mol_type = other DNA
ccagtggaagatggcttttctcttgagttttgggcggttgggaggtccagaggctaggtgtcttatcccctgtgctgctccatacacccctagcttcccaaaccaggttt

SEQ ID NO: 76923 - DNA, 110 bp, synthetic construct
  source 1..110: mol_type = other DNA
aggtgtcttatcccctgtgctgctccatacacccctagcttcccaaaccaggtttcactttgtgtactgcttctgattcgctgtgtttctttctttccttctttctttct

SEQ ID NO: 76924 - DNA, 110 bp, synthetic construct
  source 1..110: mol_type = other DNA
tgccacaagctactattcggattcgacccctagccttggacgttccatatcccacaggtgtggccataataaaaagttctcagattggctccttggacacgctgagatgc

SEQ ID NO: 76925 - DNA, 110 bp, synthetic construct
  source 1..110: mol_type = other DNA
aggtgtggccataataaaaagttctcagattggctccttggacacgctgagatgcccacccttcccaggggtcatggaatcccttctgagctgcttgcttccctcctttg

SEQ ID NO: 76926 - DNA, 110 bp, synthetic construct
  source 1..110: mol_type = other DNA
cacctgtttgtctgtggtgttccctctctttgtctttctcttccctatacttgggccactttaagttctatgatgagcttgcctagtgccgagatgaggggccagaggaa

SEQ ID NO: 76927 - DNA, 110 bp, synthetic construct
  source 1..110: mol_type = other DNA
ccagaagcatcttcgtggctgcagctcaagaaaggtataccggggaggagttcgatgtctctagaatcatgcactttgcaaatcaggacaagaggcaggggagaagggat

SEQ ID NO: 76928 - DNA, 110 bp, synthetic construct
  source 1..110: mol_type = other DNA
ctttcccagatctcttaacttctggtttctgagatctacagcccagcataggacactccctcaaagtgattaaaaggggtctggtaccacttatgctgctgaagcttggt

SEQ ID NO: 76929 - DNA, 110 bp, synthetic construct
  source 1..110: mol_type = other DNA
ctccctcaaagtgattaaaaggggtctggtaccacttatgctgctgaagcttggtgagtcctttcacctctatgggactcagtttctccatccatcaaatgggtgtgatg

SEQ ID NO: 76930 - DNA, 110 bp, synthetic construct
  source 1..110: mol_type = other DNA
gttatcccaggctttccttaaccaggaccaaccttctctttcctgtttcatctattaggctattctctgcagctcttcttaccgttctgagacacacctgctcattccca

SEQ ID NO: 76931 - DNA, 110 bp, synthetic construct
  source 1..110: mol_type = other DNA
taggctattctctgcagctcttcttaccgttctgagacacacctgctcattcccactactccgcccaagttcacgctgatcctagcccctggaatactctccctggtcct

SEQ ID NO: 76932 - DNA, 110 bp, synthetic construct
  source 1..110: mol_type = other DNA
ctattatctgtttattatgcacaagcagtaccttttctggattagctaataacactagtattgacagtaaccagcgctatttactctcttctgatgtgatgttcaaataa

SEQ ID NO: 76933 - DNA, 110 bp, synthetic construct
  source 1..110: mol_type = other DNA
acacttcttttcactagtgtatcctctctataatccactccatacaatatataaatgaaaatagatgttaccctgtctcttcaatcatttgcttagctttaagcaagtat

SEQ ID NO: 76934 - DNA, 110 bp, synthetic construct
  source 1..110: mol_type = other DNA
tgaaaatagatgttaccctgtctcttcaatcatttgcttagctttaagcaagtatagacaatgtggctttttctcatttggaaaggagaaggggagctgtctctcttggc

SEQ ID NO: 76935 - DNA, 110 bp, synthetic construct
  source 1..110: mol_type = other DNA
actcacccacgccacagcagcaacccaagctgttgcagtgacaatgccagacccttagccccatgtgccacaagggaactccagccttgtattctgtttaaacactgtgt

SEQ ID NO: 76936 - DNA, 110 bp, synthetic construct
  source 1..110: mol_type = other DNA
tagccccatgtgccacaagggaactccagccttgtattctgtttaaacactgtgtgtgtgttgacttccttatcagttcatccatccaggggccatgtatctgatgcctt

SEQ ID NO: 76937 - DNA, 110 bp, synthetic construct
  source 1..110: mol_type = other DNA
tagaatcaattgttgcatacatcggttctgtttacaaagaaattttcctcttttccaccttctatgcatgtgggattattgggtttggactcctctgtgtctttatttag

SEQ ID NO: 76938 - DNA, 110 bp, synthetic construct
  source 1..110: mol_type = other DNA
caccttctatgcatgtgggattattgggtttggactcctctgtgtctttatttagccaataaattgagtggaaagggagtgagatgttgttaaatctgggcatttaacct

SEQ ID NO: 76939 - DNA, 110 bp, synthetic construct
  source 1..110: mol_type = other DNA
caaatagcaaaatgaggctttaggaacaaagcttagtactctagtgcaaagaaggtataagtcattgtttatttgtttgacaggagaagtttcctactgagtagtagctg

SEQ ID NO: 76940 - DNA, 110 bp, synthetic construct
  source 1..110: mol_type = other DNA
tataagtcattgtttatttgtttgacaggagaagtttcctactgagtagtagctggcctacaggcatgtggacttgagacaagaaagcctgggtggaaatctagaatgtc

SEQ ID NO: 76941 - DNA, 110 bp, synthetic construct
  source 1..110: mol_type = other DNA
cttctatttggaaagtggtattgcatattgaagaaaatagaatggggattcagaattgccaggtgctggctttagctccatcactaaccacctttttggttttcacagcc

SEQ ID NO: 76942 - DNA, 110 bp, synthetic construct
  source 1..110: mol_type = other DNA
ggcacaaaaatatcagggttgtaagagtaatttcaattattatgtgcttttctgcaaaataggtcttccccaatgatgttgtgttatcaggaaatagctggtgctggttc

SEQ ID NO: 76943 - DNA, 110 bp, synthetic construct
  source 1..110: mol_type = other DNA
aaaataggtcttccccaatgatgttgtgttatcaggaaatagctggtgctggttccttattccaaagtataactcatttccaaaagacatattctggggatggtttttgt

SEQ ID NO: 76944 - DNA, 110 bp, synthetic construct
  source 1..110: mol_type = other DNA
gaaaccaaggccctgagggcatccattcctcagtgttttcacatctcacctctcacttctttatcattccgcccatgcctcacacaaaatcagaccctaagttcaagcta

SEQ ID NO: 76945 - DNA, 110 bp, synthetic construct
  source 1..110: mol_type = other DNA
cttctttatcattccgcccatgcctcacacaaaatcagaccctaagttcaagctattcttttctttttctgataatcatcaaactttagatcctcattgactggaagaca

SEQ ID NO: 76946 - DNA, 110 bp, synthetic construct
  source 1..110: mol_type = other DNA
gagacagaaaagcaagatggacttaaatttacctgagagtcaatcaactgggaagctgatgtggtctgagtagagagcatgagaaggatgaggagatgtagttggtgagt

SEQ ID NO: 76947 - DNA, 110 bp, synthetic construct
  source 1..110: mol_type = other DNA
ctgatgtggtctgagtagagagcatgagaaggatgaggagatgtagttggtgagtggacaggacccagtcttgcttgccttgtagataagcagtgtttggattttatact

SEQ ID NO: 76948 - DNA, 110 bp, synthetic construct
  source 1..110: mol_type = other DNA
tgagtttcctattatcagagagtgcaataaaagactcttagaaaagtaaggagggtaaatttttctttcttgtagtagtagactaggtaatttagatgatattccaactg

SEQ ID NO: 76949 - DNA, 110 bp, synthetic construct
  source 1..110: mol_type = other DNA
cagagagtgcaataaaagactcttagaaaagtaaggagggtaaatttttctttcttgtagtagtagactaggtaatttagatgatattccaactgactacaactagaaat

SEQ ID NO: 76950 - DNA, 110 bp, synthetic construct
  source 1..110: mol_type = other DNA
gacacagagagaatggaatatgttatatttacatagaagacaactacctgaattattcgagtaaacataatcacacacaatactaattcaaatattccaagctggtcaaa

SEQ ID NO: 76951 - DNA, 110 bp, synthetic construct; identical to SEQ ID NO: 76950
  source 1..110: mol_type = other DNA

SEQ ID NO: 76952 - DNA, 110 bp, synthetic construct; identical to SEQ ID NO: 76950
  source 1..110: mol_type = other DNA

SEQ ID NO: 76953 - DNA, 110 bp, synthetic construct; identical to SEQ ID NO: 76950
  source 1..110: mol_type = other DNA

SEQ ID NO: 76954 - DNA, 110 bp, synthetic construct
  source 1..110: mol_type = other DNA
aggtttgtaacttagaaacatcatataagtagattttgtttgttgatccagttcaacattgttgccttttaactaaaactttgactccctttgcttttattgtgatcaga

SEQ ID NO: 76955 - DNA, 110 bp, synthetic construct; identical to SEQ ID NO: 76954
  source 1..110: mol_type = other DNA

SEQ ID NO: 76956 - DNA, 110 bp, synthetic construct
  source 1..110: mol_type = other DNA
cttctcaaaactagactcaattctctaaagtcaaagaaaggaaagtctttttaattcctctccagagctgatgtgtctacattctctactgatctctgcccacccaacca

SEQ ID NO: 76957 - DNA, 110 bp, synthetic construct
  source 1..110: mol_type = other DNA
tcctctccagagctgatgtgtctacattctctactgatctctgcccacccaaccataagaccatttatagcttccatgattttctaagttggaaccacttagttccagat

SEQ ID NO: 76958 - DNA, 110 bp, synthetic construct
  source 1..110: mol_type = other DNA
gcatgctaccatccaaggagtagttttataggaaatactggaaatgggttggaaatgaggaatcagggaaaatgttggtgagaaggcagcttgtagtcctagtttgactc

SEQ ID NO: 76959 - DNA, 110 bp, synthetic construct
  source 1..110: mol_type = other DNA
tgaggaatcagggaaaatgttggtgagaaggcagcttgtagtcctagtttgactcttaatcttttagtgtttgttccaggtaagaaagaactcaaccatgaggcttaatc

SEQ ID NO: 76960 - DNA, 110 bp, synthetic construct
  source 1..110: mol_type = other DNA
cttcccagggcagaatccttgggctgggtaggtcaatgttttgctcatactcacttgcttcttgggaaaaacttctgcaattatagttcccttgtttgtggtttgccagc

SEQ ID NO: 76961 - DNA, 110 bp, synthetic construct
  source 1..110: mol_type = other DNA
tgcttcttgggaaaaacttctgcaattatagttcccttgtttgtggtttgccagcctatggttttatgtactatgtttctgcttttcatacctatctcattgtggttcct

SEQ ID NO: 76962 - DNA, 110 bp, synthetic construct; identical to SEQ ID NO: 76960
  source 1..110: mol_type = other DNA

SEQ ID NO: 76963 - DNA, 110 bp, synthetic construct; identical to SEQ ID NO: 76961
  source 1..110: mol_type = other DNA

SEQ ID NO: 76964 - DNA, 110 bp, synthetic construct
  source 1..110: mol_type = other DNA
cgtttcccttggaaagagcatgtggcctgggccacgggaggtgccctcaggaacaacagctaaaatcggtggataaatgaagaacttttggtgccgttgtctgtgcctca

SEQ ID NO: 76965 - DNA, 110 bp, synthetic construct
  source 1..110: mol_type = other DNA
ggggcgagcctgggaaacagcacgaatgagctcggggaaagccacacacaggcagagtggagaagaaggctggtccccccaccggttcgtctaaaaacaaaacctaaaac

SEQ ID NO: 76966 - DNA, 110 bp, synthetic construct
  source 1..110: mol_type = other DNA
tagtcatagtattgtggccttaattggagacagcttaggtaattatttagggacactgtcaggggctcattaaaggagaccccagggccttagttagggaaaacacaggg

SEQ ID NO: 76967 - DNA, 110 bp, synthetic construct
  source 1..110: mol_type = other DNA
ggaaacaagctgccatgttgagagcagggtgactaaccacctagcttgcctgaatgaaggtgttcccagcatacaaaaccctcagaactaaaagcaggagacaaccagtc

SEQ ID NO: 76968 - DNA, 110 bp, synthetic construct
  source 1..110: mol_type = other DNA
atacccccacctgtagtttatttcatataggttagaaagagaggaggagcgacgtcaagctggcagggacagcccagggccttatttagggggcagctgaagtctagcta

SEQ ID NO: 76969 - DNA, 110 bp, synthetic construct
  source 1..110: mol_type = other DNA
ctacttcctgagtcaggtgatttgtggaggggggactccgaggcccctgggaaatctcacattagctgctggaggaataacacgcttctgcttccctcctgcctttcttg

SEQ ID NO: 76970 - DNA, 110 bp, synthetic construct
  source 1..110: mol_type = other DNA
ctcacattagctgctggaggaataacacgcttctgcttccctcctgcctttcttgtctcttgtcctgggcactggcagcatttagactctgggatatatcctggctttgc

SEQ ID NO: 76971 - DNA, 110 bp, synthetic construct
  source 1..110: mol_type = other DNA
ccatcttctacccagttttcctaagccaggaatctgtaagtcatctgagtttacttttcccttcttgacgaccaagttctgccgttcttccatagcaacaatattctttc

SEQ ID NO: 76972 - DNA, 110 bp, synthetic construct
  source 1..110: mol_type = other DNA
tttcccttcttgacgaccaagttctgccgttcttccatagcaacaatattctttccccttgtatccgttgcttctatccatcatcaaactcttaatcatctctctcctgg

SEQ ID NO: 76973 - DNA, 110 bp, synthetic construct
  source 1..110: mol_type = other DNA
tagttatttccttttcatcctttgcaggttgctatttgattcatagctgccattatgtcttctatggcaaacgtccaactgacaatgaactgtttagaaggggatttttg

SEQ ID NO: 76974 - DNA, 110 bp, synthetic construct
  source 1..110: mol_type = other DNA
agcctcttaagatgacagagttacaaaactgtccatttcttgatggtgcacatgctttctgaagtgaagttgtcccacttcctttatctttcattccttcagctggcatc

SEQ ID NO: 76975 - DNA, 110 bp, synthetic construct
  source 1..110: mol_type = other DNA
gggcctttaggtcataagggtggagctttcaggataggattagtgcccttagaagtggaaaacttacttcctctttctgccatatgagtttacattgagaagatgattgt

SEQ ID NO: 76976 - DNA, 110 bp, synthetic construct
  source 1..110: mol_type = other DNA
tcccagtgttagcccattgcccatcaaatagcaggcactcaagacatatttgtctcactgggagttcttatctggaagacatcaggatgtctgcctctcttcagcttgct

SEQ ID NO: 76977 - DNA, 110 bp, synthetic construct
  source 1..110: mol_type = other DNA
cactgggagttcttatctggaagacatcaggatgtctgcctctcttcagcttgctctttagaactgtttgaggtccttctgtgctcatccatcttcctgcatacatctag

SEQ ID NO: 76978 - DNA, 110 bp, synthetic construct; identical to SEQ ID NO: 76976
  source 1..110: mol_type = other DNA

SEQ ID NO: 76979 - DNA, 110 bp, synthetic construct; identical to SEQ ID NO: 76977
  source 1..110: mol_type = other DNA

SEQ ID NO: 76980 - DNA, 110 bp, synthetic construct
  source 1..110: mol_type = other DNA
aattaccaaagttattcactcagcaccaccttaactgcaagccctttcaaaaactttttacccatatcactcttgtttggtgtagctatattttaaaaaatagtgttcca

SEQ ID NO: 76981 - DNA, 110 bp, synthetic construct
  source 1..110: mol_type = other DNA
ttttacccatatcactcttgtttggtgtagctatattttaaaaaatagtgttccagaagaggaagaggctctagtttcaaaataaaggcatacagaacattcctgtccat

SEQ ID NO: 76982 - DNA, 110 bp, synthetic construct
  source 1..110: mol_type = other DNA
gaggaaacaaattctcagaatcagcatttagatgttgtccttgatggtttgagtttaaagttcttttttagaaatctctgagtgctatcttataatactttgtgtcacac

SEQ ID NO: 76983 - DNA, 110 bp, synthetic construct
  source 1..110: mol_type = other DNA
cagaatcagcatttagatgttgtccttgatggtttgagtttaaagttcttttttagaaatctctgagtgctatcttataatactttgtgtcacacatttttctgcttcat

SEQ ID NO: 76984 - DNA, 110 bp, synthetic construct
  source 1..110: mol_type = other DNA
tctctggttggccacagactagaaagatatttatgcctcatgggaagacttatcaaaaagcatcttagcagaggagggcctacttgaatatcagtcatttgtcttctcca

SEQ ID NO: 76985 - DNA, 110 bp, synthetic construct
  source 1..110: mol_type = other DNA
aaaagcatcttagcagaggagggcctacttgaatatcagtcatttgtcttctccactcactactgctttcgaccaacagaactgtgagcaaagaacccatgatgacaagg

SEQ ID NO: 76986 - DNA, 110 bp, synthetic construct; identical to SEQ ID NO: 76984
  source 1..110: mol_type = other DNA

SEQ ID NO: 76987 - DNA, 110 bp, synthetic construct; identical to SEQ ID NO: 76985
  source 1..110: mol_type = other DNA

SEQ ID NO: 76988 - DNA, 110 bp, synthetic construct
  source 1..110: mol_type = other DNA
gatgggaaaccttgaggcagaaattcacaggtattttctatttcctttcacattaacagtctgaaagaaaggagggcacatcgttttcagctgggatgtctctgtgtgtg

SEQ ID NO: 76989 - DNA, 110 bp, synthetic construct
  source 1..110: mol_type = other DNA
acagtctgaaagaaaggagggcacatcgttttcagctgggatgtctctgtgtgtgtagctgtatgtttctgtggcctatgggccttttattggcccaacacccactgggg

SEQ ID NO: 76990 - DNA, 110 bp, synthetic construct
  source 1..110: mol_type = other DNA
ttatacatagtagttaatacctcctaatcccctgtcttgcccctccctgctaccctctccccactggtaagcactagtttgatccgctgaatatgtgagtctgcttcttt

SEQ ID NO: 76991 - DNA, 110 bp, synthetic construct
  source 1..110: mol_type = other DNA
tgacaatgctggatccttaactcactgagcaagggcaaggattgaacccacatcctcatcaacacagggttaggtttttacccggctgagctacaatggaaactccaatt

SEQ ID NO: 76992 - DNA, 110 bp, synthetic construct
  source 1..110: mol_type = other DNA
tcatcaacacagggttaggtttttacccggctgagctacaatggaaactccaattgtgtgcttttttatgtgcccactatgttcttaagtgtttttcatatgctctatac

SEQ ID NO: 76993 - DNA, 110 bp, synthetic construct
  source 1..110: mol_type = other DNA
tatcttctgtatctattatcattcagtcccattattgttgtgcaacctcctctttaggaaaaccatcagaccctaaaataaaatgttcagaaacacgcaaatgaagatgg

SEQ ID NO: 76994 - DNA, 110 bp, synthetic construct
  source 1..110: mol_type = other DNA
ttctgtgtaattagaaacatctttcagacttttgataactttgacttagttattaaacatcatatcactaagttgttgagagcagctgattcaactgggttggccagtaa

SEQ ID NO: 76995 - DNA, 110 bp, synthetic construct
  source 1..110: mol_type = other DNA
aacatcatatcactaagttgttgagagcagctgattcaactgggttggccagtaaagactcatcttgaagtgaaggtaagataagcataaatatttagcctttaagattt

SEQ ID NO: 76996 - DNA, 110 bp, synthetic construct
  source 1..110: mol_type = other DNA
gataaatgcaataagaaaagcccctgttcctttgttcaccactaattcatcacacttttcacggctggatctcaactgaagcaacacagatttgacctttaaatcttagc

SEQ ID NO: 76997 - DNA, 110 bp, synthetic construct
  source 1..110: mol_type = other DNA
ttttcacggctggatctcaactgaagcaacacagatttgacctttaaatcttagctaggttgcatttgatcctatctcccacaggtataactgcatcgaattcagtgctt

SEQ ID NO: 76998 - DNA, 110 bp, synthetic construct; identical to SEQ ID NO: 76996
  source 1..110: mol_type = other DNA

SEQ ID NO: 76999 - DNA, 110 bp, synthetic construct; identical to SEQ ID NO: 76997
  source 1..110: mol_type = other DNA

SEQ ID NO: 77000 - DNA, 110 bp, synthetic construct
  source 1..110: mol_type = other DNA
aaagaagatacaaaaatggccctaaagaaattctagcacaccaaaacaaatttttacagtaagaaaatgtggattttggtaaatgttgaccataagaactatggatatgg

SEQ ID NO: 77001 - DNA, 110 bp, synthetic construct
  source 1..110: mol_type = other DNA
ttggagagtctccggagaggcaggtagcaactgcagctcaccctaagcacgcagacgctggctgcagctatgctgctggcaggggtcagagcgcactccttcctctagct

SEQ ID NO: 77002 - DNA, 110 bp, synthetic construct
  source 1..110: mol_type = other DNA
cgctggctgcagctatgctgctggcaggggtcagagcgcactccttcctctagctcttcagctccaaaacgtcacccctttccggcctgcatgccccagggctgggacgc

SEQ ID NO: 77003 - DNA, 110 bp, synthetic construct
  source 1..110: mol_type = other DNA
tctgggaggcaaaggagcactccaccagggcaggcggaactggcaggaccacactgcagtggaggcagacttcccatggctgtgcagagctttccctcgtgcttctgact

SEQ ID NO: 77004 - DNA, 110 bp, synthetic construct
  source 1..110: mol_type = other DNA
gcagtggaggcagacttcccatggctgtgcagagctttccctcgtgcttctgactgcagagctcttccggggtggtgcttggaggctgctccatgggggagtgtagcccc

SEQ ID NO: 77005 - DNA, 110 bp, synthetic construct
  source 1..110: mol_type = other DNA
gattataaaggaactaaactaataacttaattatatttaagatttgagcaaatagcttggtttgaatctactcatcctgagactatggctatggctactctctggtctcc

SEQ ID NO: 77006 - DNA, 110 bp, synthetic construct
  source 1..110: mol_type = other DNA
cttggtttgaatctactcatcctgagactatggctatggctactctctggtctccatcaaattctttccccttttatcattataattgtccaaacctataatatgctatg

SEQ ID NO: 77007 - DNA, 110 bp, synthetic construct
  source 1..110: mol_type = other DNA
gtaagctagcattttagctattgggggtattttctgtttatttttggtttgcttctttggttcactatgtccaaactgactttggtcttgctttacaagcattcttgaga

SEQ ID NO: 77008 - DNA, 110 bp, synthetic construct
  source 1..110: mol_type = other DNA
tttggttcactatgtccaaactgactttggtcttgctttacaagcattcttgagatggagagtaagttaggctttgggattctcacaggccaccaagtgaccctgcattt

SEQ ID NO: 77009 - DNA, 110 bp, synthetic construct
  source 1..110: mol_type = other DNA
caatatattgtccccaaagtaaccatcattaaccgaggaagaagggcacggggcgagaaagcaaataagtaagactcaagaatgacatgtctgcaaaactttgaacacat

SEQ ID NO: 77010 - DNA, 110 bp, synthetic construct
  source 1..110: mol_type = other DNA
ttggtgcttttccttgaaatgtggacaaactgttttcttgggctaacttctcacccttgttcattggcagttagcttggtaagtgtaaataaagtggtcgacacaaatgt

SEQ ID NO: 77011 - DNA, 110 bp, synthetic construct
  source 1..110: mol_type = other DNA
aaatatagcaaattacaattcttctctataattcatctggcatatgatattattggccaccatataaatggacatttgtgccacagcagggggttatctgcaaagtcagg

SEQ ID NO: 77012 - DNA, 110 bp, synthetic construct
  source 1..110: mol_type = other DNA
ccacagcagtgcaggatccaacctgcatctacgacttatgccacagtttgtggcaacattggatccctaacccactgagcgaggccagggattgcacctgtatctgcagg

SEQ ID NO: 77013 - DNA, 110 bp, synthetic construct
  source 1..110: mol_type = other DNA
acattggatccctaacccactgagcgaggccagggattgcacctgtatctgcagggacactctcttgggttcttaatcctctacgccacaacagaactccctacatggat

SEQ ID NO: 77014 - DNA, 110 bp, synthetic construct
  source 1..110: mol_type = other DNA
tatgtgtcatatggtagccttaaatgaggcaagtatgccatagaaattgatttctgccctcagaatatgccacatcccttaccgttccagcttctgacagtttttatctt

SEQ ID NO: 77015 - DNA, 110 bp, synthetic construct
  source 1..110: mol_type = other DNA
gccctcagaatatgccacatcccttaccgttccagcttctgacagtttttatcttatttgagggcaggttatggcagtagtgaagcattgtctcttccctgtgcaataat

SEQ ID NO: 77016 - DNA, 110 bp, synthetic construct
  source 1..110: mol_type = other DNA
ggaatccccactttgtccatttttagaaaatataaaataacagctgttttgttagactattattaagcttaggagtagcatattcagagttcaagtacagtccctgatac

SEQ ID NO: 77017 - DNA, 110 bp, synthetic construct
  source 1..110: mol_type = other DNA
actattattaagcttaggagtagcatattcagagttcaagtacagtccctgataccccaaccatgctcaacattgacaattaccgtttttatgattattgtaggctgtga

SEQ ID NO: 77018 - DNA, 110 bp, synthetic construct
  source 1..110: mol_type = other DNA
tgagccatggcaggaactccctaatgtgaagaatattgtgattgagtagatggagaaggacaggccagggaagactttttgacgttctagctcctgattggtcgcctggg

SEQ ID NO: 77019 - DNA, 110 bp, synthetic construct
  source 1..110: mol_type = other DNA
aaggacaggccagggaagactttttgacgttctagctcctgattggtcgcctgggcatatgagggctgtatttactgagtaggaaataataggagggaaatacggattgg

SEQ ID NO: 77020 - DNA, 110 bp, synthetic construct
  source 1..110: mol_type = other DNA
ctggggtctttggaggctctaggtgactgaaggtataaattatgccctgcctggcacctcccttccaggggaagtggttgttcagctcttccaaggattgtggatgggca

SEQ ID NO: 77021 - DNA, 110 bp, synthetic construct
  source 1..110: mol_type = other DNA
ccctattgtatctagcatttgatttcttctgcccttagaagtttccattgctgcagctgcttctaatttttgataagcaaatggtaacctagagaatttcattctaatgc

SEQ ID NO: 77022 - DNA, 110 bp, synthetic construct
  source 1..110: mol_type = other DNA
cagtagggaggcaagggtggacacagagagatcagatgaaaaggcttgagcatcaaaggtccacgtgagagatggtggtgggtgagctgatgatgatggcagagatccca

SEQ ID NO: 77023 - DNA, 110 bp, synthetic construct
  source 1..110: mol_type = other DNA
aaggtccacgtgagagatggtggtgggtgagctgatgatgatggcagagatcccaaccggacttgctgatggactggatggaaaaatagggcaataccttggggtttggc

SEQ ID NO: 77024 - DNA, 110 bp, synthetic construct
  source 1..110: mol_type = other DNA
ctttccttgtctgcttgctgctgtacttctactctaactttcttgggtcataaagtctctttttcattcagtgctatagctgttcctttcgtttggttgggctttggtat

SEQ ID NO: 77025 - DNA, 110 bp, synthetic construct
  source 1..110: mol_type = other DNA
tctctttttcattcagtgctatagctgttcctttcgtttggttgggctttggtatccgggctgcttctgtgtgtgtgtgtgtactaatatgtgcttcaccttggctctcc

SEQ ID NO: 77026 - DNA, 110 bp, synthetic construct
  source 1..110: mol_type = other DNA
ggggagcaattcctagtgagagaaacagctgagtcatcagcaacctgtattcttagcaactggaatagatgtggcagctggggaggatctgtatggaaccctgcagtatc

SEQ ID NO: 77027 - DNA, 110 bp, synthetic construct
  source 1..110: mol_type = other DNA
gcaactggaatagatgtggcagctggggaggatctgtatggaaccctgcagtatctattacgctatattaactcactcaatccacgtggcataaataccattattactca

SEQ ID NO: 77028 - DNA, 110 bp, synthetic construct
  source 1..110: mol_type = other DNA
ctcttgctgctttgaatagtttgtttttggttttcaacattttgactgtaatgttcttaagcatggatctctttgatatattgttgaagttcactgagcttctttgttgt

SEQ ID NO: 77029 - DNA, 110 bp, synthetic construct; identical to SEQ ID NO: 77028
  source 1..110: mol_type = other DNA

SEQ ID NO: 77030 - DNA, 110 bp, synthetic construct
  source 1..110: mol_type = other DNA
tagttttacctatatagtattattccagcttgggtctaaagtgatgatagcaggtcctgttatggctcagcagaaacaaatctggctagtatccatgaggacgcaggttt

SEQ ID NO: 77031 - DNA, 110 bp, synthetic construct
  source 1..110: mol_type = other DNA
tgggtttatttgggggctttctattctgttccattgatctttgtgtctggttttacaccactatcatactgctttgtttactgtagcttttagtatagtttgaaatcagg

SEQ ID NO: 77032 - DNA, 110 bp, synthetic construct
  source 1..110: mol_type = other DNA
tctggttttacaccactatcatactgctttgtttactgtagcttttagtatagtttgaaatcagggtgcatgatcccctcagctttgttctctttttcaagattgttttg

SEQ ID NO: 77033 - DNA, 110 bp, synthetic construct
  source 1..110: mol_type = other DNA
ctgggactaatggttgcaggtctttttcccaggatggccatatttctgccttgttaagttagaaggcctgtgtaactacacagcgattaagcctattgcttatttagctt

SEQ ID NO: 77034 - DNA, 110 bp, synthetic construct
  source 1..110: mol_type = other DNA
aagttagaaggcctgtgtaactacacagcgattaagcctattgcttatttagcttctgacagactaccccagcttagagattttatgtccattgatgtctaatttgcctt

SEQ ID NO: 77035 - DNA, 110 bp, synthetic construct
  source 1..110: mol_type = other DNA
gctaaatatgcaaaaatatatcctaatatgaatcctctcctcatggaactttcattgtagtaaccagaggttaaagttaaagcctattgagtggagaatccatttcctta

SEQ ID NO: 77036 - DNA, 110 bp, synthetic construct
  source 1..110: mol_type = other DNA
tgtagtaaccagaggttaaagttaaagcctattgagtggagaatccatttccttagggaaactatatttgatgagactatatagtaggtagaggagtcatggctgcaatg

SEQ ID NO: 77037 - DNA, 110 bp, synthetic construct
  source 1..110: mol_type = other DNA
atatttccagtattcatattaattccttcagattgaccatagtcacgatgctgtacattaaatttctagccttattctttctatgtaactgtaactttatacccactgac

SEQ ID NO: 77038 - DNA, 110 bp, synthetic construct
  source 1..110: mol_type = other DNA
ctctgactccagaggtgggcatggcccgctaccactagaggtccctgaaaggcacctatgcgaccccagtcacctcagaagagggcgctgtgattgaactctgtcttttc

SEQ ID NO: 77039 - DNA, 110 bp, synthetic construct; identical to SEQ ID NO: 77038
  source 1..110: mol_type = other DNA

SEQ ID NO: 77040 - DNA, 110 bp, synthetic construct
  source 1..110: mol_type = other DNA
taaacaaagtaattaataagaaaattcagcttaataagggatacttggacaaataatcttaatcacaatgtgttacattagaccaagactgcaggaactctggcactgtg

SEQ ID NO: 77041 - DNA, 110 bp, synthetic construct
  source 1..110: mol_type = other DNA
agagacgcgaagacaaataagtaccaaaaagacagctgttgtagttccagttgtgcttagtaattagcaaaccagactaacacccatgaggatgtgggttcgatccctgg

SEQ ID NO: 77042 - DNA, 110 bp, synthetic construct; identical to SEQ ID NO: 77041
  source 1..110: mol_type = other DNA

SEQ ID NO: 77043 - DNA, 110 bp, synthetic construct
  source 1..110: mol_type = other DNA
caaaaaaactgctttaaaaatacatgtgctctgcatttagttgattttcagcaccccccccccttctcctacattttaacatcttcaaaataatggtgtatcttaagatc

SEQ ID NO: 77044 - DNA, 110 bp, synthetic construct; identical to SEQ ID NO: 77043
  source 1..110: mol_type = other DNA

SEQ ID NO: 77045 - DNA, 110 bp, synthetic construct
  source 1..110: mol_type = other DNA
aaaacctcatcttcttgaattaaaattcaaagacattcaacatgggctaccagaccctctgaatctgagttccagctgcctacataaccttttgtttttattgttttttt

SEQ ID NO: 77046 - DNA, 110 bp, synthetic construct
  source 1..110: mol_type = other DNA
cctctgaatctgagttccagctgcctacataaccttttgtttttattgtttttttcctctcacttatgttcaagccacaatgaccatcttcctgctcctcagacttgtta

SEQ ID NO: 77047 - DNA, 110 bp, synthetic construct
  source 1..110: mol_type = other DNA
ttaaataatttcacacccacatagccacacatatgtaatcctacaaactccttcaacttcaattggtttgcaatctcacctgttttttcacacactcacaatttcacacc

SEQ ID NO: 77048 - DNA, 110 bp, synthetic construct
  source 1..110: mol_type = other DNA
acttcaattggtttgcaatctcacctgttttttcacacactcacaatttcacaccaatgatacagctgatggcagtgactattagtgaccttaagaacacggctgggttt

SEQ ID NO: 77049 - DNA, 110 bp, synthetic construct
  source 1..110: mol_type = other DNA
tgggtcccagggcaaagcagagactacatagaaatctgggtcacgcctgcctgtggttattggaggatcacctgggaaaacagggaatgactgtggctcattgttgggga

SEQ ID NO: 77050 - DNA, 110 bp, synthetic construct
  source 1..110: mol_type = other DNA
agcagagactacatagaaatctgggtcacgcctgcctgtggttattggaggatcacctgggaaaacagggaatgactgtggctcattgttggggaagaagacattggagg

SEQ ID NO: 77051 - DNA, 110 bp, synthetic construct
  source 1..110: mol_type = other DNA
gtctcctgggctatagtcttcagtttgggtcaaagagatctcttttttattcctgttctagtttggttattgattacctgcattgacaatgtaaatggccaaggcacact

SEQ ID NO: 77052 - DNA, 110 bp, synthetic construct
  source 1..110: mol_type = other DNA
ttctagtttggttattgattacctgcattgacaatgtaaatggccaaggcacactactggcagtggatgctataggacccttgggattcccattaccaggccaggctcct

SEQ ID NO: 77053 - DNA, 110 bp, synthetic construct
  source 1..110: mol_type = other DNA
tatatccatcctctggattcttttcagaattttttcacattccattcccatgttagtgcctctgctacccatattccccacccaaggtactctacctttcctccttcagt

SEQ ID NO: 77054 - DNA, 110 bp, synthetic construct
  source 1..110: mol_type = other DNA
gtgcctctgctacccatattccccacccaaggtactctacctttcctccttcagtttaacattaatgttcaatttgcccctgagccagtggaatttttttctttgaaata

SEQ ID NO: 77055 - DNA, 110 bp, synthetic construct
  source 1..110: mol_type = other DNA
tcaatactctattggccctgctgaccttagtggacactggccacagcatttacactactgcagtttgactttgagctttggtctggatactcacatgagcctggtccatg

SEQ ID NO: 77056 - DNA, 110 bp, synthetic construct
  source 1..110: mol_type = other DNA
tttggcctaggaacttccacatgccataggtgcaggcaaaaaaaaaaaaaaaaaaaaaaaaagggaaaatagacttaaagctattaactgtaaaaggctatgagagtatt

SEQ ID NO: 77057 - DNA, 110 bp, synthetic construct
  source 1..110: mol_type = other DNA
gggtcaaagttaagaaatagaggtcacttcaggagaaagatgatgtcggaccaaataactctctaccaattctcacatacaaagctatgagccccagtttcctagggaaa

SEQ ID NO: 77058 - DNA, 110 bp, synthetic construct
  source 1..110: mol_type = other DNA
ctaatttactgatagaaccctattatttctgggatccagttgaaatccctttatttcaaatagaccagaagcttccttgcccagtccaagtgatgaataatgataatttt

SEQ ID NO: 77059 - DNA, 110 bp, synthetic construct
  source 1..110: mol_type = other DNA
tcaaatagaccagaagcttccttgcccagtccaagtgatgaataatgataattttactacctttggccactgattggctcaattctggccaatgatctataaaaaggtac

SEQ ID NO: 77060 - DNA, 110 bp, synthetic construct
  source 1..110: mol_type = other DNA
ttccaggggtggcactttctcctcctacagccctgtcaccttggggcctgaggttggggtaggtatcccctttgtcccactttgctgcttccagaccattgttccttcca

SEQ ID NO: 77061 - DNA, 110 bp, synthetic construct
  source 1..110: mol_type = other DNA
ggggtaggtatcccctttgtcccactttgctgcttccagaccattgttccttccacccacccttaaaatcatccaattttaaatctcagtccagctaattacatacccaa

SEQ ID NO: 77062 - DNA, 110 bp, synthetic construct
  source 1..110: mol_type = other DNA
tggaaccaaacctgtactaactccaaggaatgcctgtatctgagtttctgtgggtcagaaatctggcatgttttagctaggtcctttgctttggatctcacaggctaaaa

SEQ ID NO: 77063 - DNA, 110 bp, synthetic construct
  source 1..110: mol_type = other DNA
cagaaatctggcatgttttagctaggtcctttgctttggatctcacaggctaaaaccaaagcactggttccaagctcgtttaggttggtggcagaatccagttctttctg

SEQ ID NO: 77064 - DNA, 110 bp, synthetic construct
  source 1..110: mol_type = other DNA
gagggagatggcctgtgggaagagagagagagatgcctgatcagcctgcaggcacttaagtcatcccagctgtggttctagataccttggagcaaagcagagctgactct

SEQ ID NO: 77065 - DNA, 110 bp, synthetic construct
  source 1..110: mol_type = other DNA
ttaagtcatcccagctgtggttctagataccttggagcaaagcagagctgactctgctgtgccctgtccagtttcatgaccgcaaaaagcatgatacaagtgtaataata

SEQ ID NO: 77066 - DNA, 110 bp, synthetic construct
  source 1..110: mol_type = other DNA
ctttgtgtctccaggcctcaatgtctccacccatccctctgacttaattcttctaggaccacaaagagagcagtgcatacatctagaatgaaaggcatctctaggtcccc

SEQ ID NO: 77067 - DNA, 110 bp, synthetic construct
  source 1..110: mol_type = other DNA
ggaccacaaagagagcagtgcatacatctagaatgaaaggcatctctaggtcccccaaacctatggaatgttagaagtaggattatttttctttttcagcacccccaggc

SEQ ID NO: 77068 - DNA, 110 bp, synthetic construct
  source 1..110: mol_type = other DNA
atatggacctccgctaaagcagaacaataggcatagagaggagactagttatctgcagaagactggacaggatttgttgcttattagatattggtgggaggtgaaggagc

SEQ ID NO: 77069 - DNA, 110 bp, synthetic construct
  source 1..110: mol_type = other DNA
gggaagtcaggatgtggccgccaaggcatctgatggattctgactcattttcttcatctcattacggggtctgggagcacaagtcctcactccttgtcagctcatagagc

SEQ ID NO: 77070 - DNA, 110 bp, synthetic construct
  source 1..110: mol_type = other DNA
atctcattacggggtctgggagcacaagtcctcactccttgtcagctcatagagccccttccttgaaacatgcccagcctctaccctggagcggtctcacccagctcttg

SEQ ID NO: 77071 - DNA, 110 bp, synthetic construct
  source 1..110: mol_type = other DNA
ctcaccccttccgtgctccactggccattgtcccccggaccaccacccacagatgaacctgaactcctccttaacagctgagcgctcccactgtctgcacagctacctct

SEQ ID NO: 77072 - DNA, 110 bp, synthetic construct
  source 1..110: mol_type = other DNA
aacctgaactcctccttaacagctgagcgctcccactgtctgcacagctacctctgtcctttggctggactgtgagctcaagggcacagaagatggttctggcttgtcac

SEQ ID NO: 77073 - DNA, 110 bp, synthetic construct
  source 1..110: mol_type = other DNA
tgctcaagagaaatgagaactgatgtctacataacatcttgtacaggaatgttagttgaatgttactcataagagccagaaaagggaagccacccagatgtccagcagct

SEQ ID NO: 77074 - DNA, 110 bp, synthetic construct
  source 1..110: mol_type = other DNA
ttgaatgttactcataagagccagaaaagggaagccacccagatgtccagcagctaatgaatggacaattcaacgtgatatatccatacaaaggaacattgttgagccat

SEQ ID NO: 77075 - DNA, 110 bp, synthetic construct
  source 1..110: mol_type = other DNA
catcctcagaccagcccatgatgctgctgccatcattaaacacaaagatgacaggatctggactcagcagtcccatcctgcgctgccatttcctagctgtgcatgtgacc

SEQ ID NO: 77076 - DNA, 110 bp, synthetic construct
  source 1..110: mol_type = other DNA
atctggactcagcagtcccatcctgcgctgccatttcctagctgtgcatgtgacctcgggcctcctttgcctcatttattaaaatgcagttaaggatagccttccttggt

SEQ ID NO: 77077 - DNA, 110 bp, synthetic construct
  source 1..110: mol_type = other DNA
caatagtgttaattcagctccaacacaagtctttgttacagttctcatttcagcgtaggcagctcagatgagcttatcacacagctttgaccgacattctgggatggcac

SEQ ID NO: 77078 - DNA, 110 bp, synthetic construct
  source 1..110: mol_type = other DNA
ttccaactactcttgatattgagaacatagagggacatgagctgactctcccttgtgtgggatgagagggtccaacaggtgctttgggaacccattgaaataaaagtacg

SEQ ID NO: 77079 - DNA, 110 bp, synthetic construct
  source 1..110: mol_type = other DNA
aagtatcagtctcggaaaaaattagctccatttcaagcctgttaaatttgtagtgtggtaagttaagttggcattgtacttaaatcttgtctctatacaattgggttctt

SEQ ID NO: 77080 - DNA, 110 bp, synthetic construct
  source 1..110: mol_type = other DNA
gataaagcacatgaaattaaactctatttgctaatgctgcccagaaatacatgcgttcagccgttctcaaaaagcttttgagcacctggataatcatttgggttagctcc

SEQ ID NO: 77081 - DNA, 110 bp, synthetic construct
  source 1..110: mol_type = other DNA
caattctgggaagattataaatagcaactaaataggcctaatactttttgaggatcttttaaaatgtagctcacatttcatcctccaggaagtctacctgaattttcagt

SEQ ID NO: 77082 - DNA, 110 bp, synthetic construct
  source 1..110: mol_type = other DNA
agttctactaatgagttggttaggttgtgccacccctttgaacatgtctcctcgtgtatcagatggggcgctgagacagcgatctttaggatctgagcaattctacagtc

SEQ ID NO: 77083 - DNA, 110 bp, synthetic construct
  source 1..110: mol_type = other DNA
gccttctaacaagcaggcattgttgcttagctgttttacctgtgccatcgtacctcctcctccaaactgaaaactcctgaaggggctgtggctgttacacctccttgtaa

SEQ ID NO: 77084 - DNA, 110 bp, synthetic construct
  source 1..110: mol_type = other DNA
cctcctccaaactgaaaactcctgaaggggctgtggctgttacacctccttgtaactcccccaaacacctgcctgccatagagctctgtgcccagtcagctttcaatgac

SEQ ID NO: 77085 - DNA, 110 bp, synthetic construct
  source 1..110: mol_type = other DNA
gctaccttgtgccaggaatcatctgtgttccatccccaaccagtgataacattcttactgccaacagccagctcaaaaactttatattagcatctgcattcatccctgca

SEQ ID NO: 77086 - DNA, 110 bp, synthetic construct
  source 1..110: mol_type = other DNA
tactgccaacagccagctcaaaaactttatattagcatctgcattcatccctgcaagtcagatttcctggaaagcagattctgggatggacatttgcatattggagactt

SEQ ID NO: 77087 - DNA, 110 bp, synthetic construct
  source 1..110: mol_type = other DNA
cccatcccagagcacctggcttggcaagtggagggagcagctggttctactcacgcctaagcaagcccctcatgcagaacacaaagtgcaggcctatgcagcactagggg

SEQ ID NO: 77088 - DNA, 110 bp, synthetic construct
  source 1..110: mol_type = other DNA
cattagaccatgtttctaaaagaaaaaatactcaaggcacatttcaaaatttagataacacagtgaggttcatacttaggcttagtcagaagttcaattactaatgatgt

SEQ ID NO: 77089 - DNA, 110 bp, synthetic construct
  source 1..110: mol_type = other DNA
acacctctaatcataggagcttaaagaactgtcttacatctaggagttcccattgtggctcagtggatgaagaacccgactagagtctatgaggattccagttcaatcct

SEQ ID NO: 77090 - DNA, 110 bp, synthetic construct
  source 1..110: mol_type = other DNA
gtaaggggcagtcataacaatagtgattatttatgattgtcggtgctgccaccctcaccatcccactgatgcacaaggcacacctttccactccttcacaacaacaaatt

SEQ ID NO: 77091 - DNA, 110 bp, synthetic construct
  source 1..110: mol_type = other DNA
gtgtatatgtgacagggcagagagaagctgaaaaggatgacacctgatgggaattgataagttgagaatcattctatagtgagtttttatggcatttggtttcctctgcc

SEQ ID NO: 77092 - DNA, 110 bp, synthetic construct
  source 1..110: mol_type = other DNA
gataagttgagaatcattctatagtgagtttttatggcatttggtttcctctgccgtgggcatatcaaagagccgaagaaatatgcaggctaaggaggacggattcccta

SEQ ID NO: 77093 - DNA, 110 bp, synthetic construct
  source 1..110: mol_type = other DNA
gtatcctgcctcctcttttctaaatcttaccctttcctttatattattccaagctgctgtccttacatttgagataactatttccttgtttttctttttttgtctttttg

SEQ ID NO: 77094 - DNA, 110 bp, synthetic construct
  source 1..110: mol_type = other DNA
ttttctaaatcttaccctttcctttatattattccaagctgctgtccttacatttgagataactatttccttgtttttctttttttgtctttttgccttttctagggctg

SEQ ID NO: 77095 - DNA, 110 bp, synthetic construct
  source 1..110: mol_type = other DNA
gtgggatttgaagaggacagtgtgggacacaggcagaccaaacagaagactcctccagtgatgtaagagatgagaagggcttgaactgggaagctgcaagaggaaggaga

SEQ ID NO: 77096 - DNA, 110 bp, synthetic construct
  source 1..110: mol_type = other DNA
cagtgatgtaagagatgagaagggcttgaactgggaagctgcaagaggaaggagagaagagcaggtttctttttggtgattgggatgaatggtgatatcatccacttgga

SEQ ID NO: 77097 - DNA, 110 bp, synthetic construct
  source 1..110: mol_type = other DNA
ttgttgggctaagaaggtacttactctccattcctgtctccccatccttctcttgagccttttggatgttctcactcctcctttggtcccctctccaccctgaatccact

SEQ ID NO: 77098 - DNA, 110 bp, synthetic construct
  source 1..110: mol_type = other DNA
tggaagagagcaggtggaatgggaactgcaggttctattcctagggccactctttgtgagatatggggaaagtcagttccgtgctcagggcctcagtttcctcattagta

SEQ ID NO: 77099 - DNA, 110 bp, synthetic construct
  source 1..110: mol_type = other DNA
agcatttatgcaactgtcataaggtcacaagctgctgattcttggagcatgacttcaagcccaggtctgactccactgtcctgaatgctggcactgtaatttaatgcttt

SEQ ID NO: 77100 - DNA, 110 bp, synthetic construct
  source 1..110: mol_type = other DNA
acctgtatctcctctcctacttgatcagtgtggcatttgtggactagacagggaaggaagaaataaacgactcacaggcagatgtccgtctagcttggacacgtggcctt

SEQ ID NO: 77101 - DNA, 110 bp, synthetic construct
  source 1..110: mol_type = other DNA
ggaagaaataaacgactcacaggcagatgtccgtctagcttggacacgtggccttacccacttgctctgtcccagcttggacactttgccctccctgatgctgtacaatg

SEQ ID NO: 77102 - DNA, 110 bp, synthetic construct
  source 1..110: mol_type = other DNA
ttactacagtatctggttacaattgttctattttattatcagctatcagtgtaagttttatcataggcatgtgtataggaaaaatatagcatacatagagttcaggacta

SEQ ID NO: 77103 - DNA, 110 bp, synthetic construct
  source 1..110: mol_type = other DNA
tgacattaatttcggacaagagcaggcagttgtggttccctggtaaccagaaatcatgtcatgttgctttgtaatgtggttatagcaggagctagtaccaagctccatgg

SEQ ID NO: 77104 - DNA, 110 bp, synthetic construct
  source 1..110: mol_type = other DNA
atgtcatgttgctttgtaatgtggttatagcaggagctagtaccaagctccatgggattcttttttttttgtcttttcgccttttctagggccgctccggtggcgtatgg

SEQ ID NO: 77105 - DNA, 110 bp, synthetic construct
  source 1..110: mol_type = other DNA
agtccaaaagctttttggataaagcttttttttaaaactattttcagcctatgtcacacacgttttttttttactgactggtgtacatctgtatatacatatgcatgctg

SEQ ID NO: 77106 - DNA, 110 bp, synthetic construct
  source 1..110: mol_type = other DNA
taaatcaatgctaaaagaattcacccttttaagaagagtgatggacacgtttctctttactgactttgatcagtgaagccctttatgatgcaggccattttcttgatttg

SEQ ID NO: 77107 - DNA, 110 bp, synthetic construct
  source 1..110: mol_type = other DNA
tatttagaatattgatcattactgttattgctgctattttggtggtcactctactgtgtctgttcctgcagggtttttggaaagaacactgctgagaataactgttgcta

SEQ ID NO: 77108 - DNA, 110 bp, synthetic construct
  source 1..110: mol_type = other DNA
gtagtcagtcagctatctatgcgtgaggacccccaaggtggccctgtgcagtcagatgaggaggcagaaagggtatctactggtactcaacaaaattccaattgcctgac

SEQ ID NO: 77109 - DNA, 110 bp, synthetic construct
  source 1..110: mol_type = other DNA
gtgatgggcagcctgccattgagaacaaccacggtcatcttggggtggggagtgttgaaaaatagctaacatgcgttggtcacttgactctttgtcagatgctgttctgg

SEQ ID NO: 77110 - DNA, 110 bp, synthetic construct
  source 1..110: mol_type = other DNA
tgtgaagtagaacttccatactgacgtaagttcagtcaacctacagaattgtgcatgtaatatgggttgtaattttaggcagtcaaaaattagaggtatgagggtgttcc

SEQ ID NO: 77111 - DNA, 110 bp, synthetic construct
  source 1..110: mol_type = other DNA
tgtaatatgggttgtaattttaggcagtcaaaaattagaggtatgagggtgttcccattgtgtctcagcaggttaataacccaactagtatccatgaggatatgggtttg

SEQ ID NO: 77112 - DNA, 110 bp, synthetic construct
  source 1..110: mol_type = other DNA
tccacacaagaggtacccagccatccgtagcctgcacaagaagtgcccagtgtcctgtagcccaagcaagtggctcctcgccacctgtagcttgtgccagatgtgtccca

SEQ ID NO: 77113 - DNA, 110 bp, synthetic construct
  source 1..110: mol_type = other DNA
tgtagcccaagcaagtggctcctcgccacctgtagcttgtgccagatgtgtcccaccctctgagaacctgcatgttcacagggagattcctatgatggtccacctcctgc

SEQ ID NO: 77114 - DNA, 110 bp, synthetic construct
  source 1..110: mol_type = other DNA
tgtaatgggctctttgatttaaaaaaagaaaatctgcaagaaagttaaaatccattttaatattcccagcactcagccaggagaagatgcagatagaattgaaaaacagc

SEQ ID NO: 77115 - DNA, 110 bp, synthetic construct
  source 1..110: mol_type = other DNA
gtgtgccagaggcgatatgttctttaagtcatttaattgtgtcttattacatgttattggtatattccatttatgattaatttgtctttttaatactgttcttgggcaga

SEQ ID NO: 77116 - DNA, 110 bp, synthetic construct; identical to SEQ ID NO: 77115
  source 1..110: mol_type = other DNA

SEQ ID NO: 77117 - DNA, 110 bp, synthetic construct
  source 1..110: mol_type = other DNA
tggctggataccacctgcccaaggtagtctgcagcttcagatctccaaattacacttttacaatgataggaatcttaactggaaaagtgacatgtattcttgttcttggg

SEQ ID NO: 77118 - DNA, 110 bp, synthetic construct
  source 1..110: mol_type = other DNA
atttgatagtgtgttttatgttagaatgtgatctattttggtaactgttcctcatgagcttgagaaaaatttttgtgctgcttttgttggatgatgaattcctaaatatc

SEQ ID NO: 77119 - DNA, 110 bp, synthetic construct
  source 1..110: mol_type = other DNA
gagcttgagaaaaatttttgtgctgcttttgttggatgatgaattcctaaatatcaaccagatccaattgattgatggtgctgtttggttcaactgattttccgcctcct

SEQ ID NO: 77120 - DNA, 110 bp, synthetic construct
  source 1..110: mol_type = other DNA
ttaagtgaagtgacagaggacacattatcagcgaccaagtcaggtggaggggataagtctctaaacggggaaaagctagatcggagtccactgtttgcttgcttttgaaa

SEQ ID NO: 77121 - DNA, 110 bp, synthetic construct
  source 1..110: mol_type = other DNA
agtctctaaacggggaaaagctagatcggagtccactgtttgcttgcttttgaaatgttgtcaagtcactttcccacagtggttgagagaaagttctagaactagattga

SEQ ID NO: 77122 - DNA, 110 bp, synthetic construct
  source 1..110: mol_type = other DNA
gcacaaagacaggaaaatgaaactagagaaaggtccttccagaaataactctaaataactaatatcacaccaaaagaggaacgtccagatgagttcttcagccacacagc

SEQ ID NO: 77123 - DNA, 110 bp, synthetic construct
  source 1..110: mol_type = other DNA
taactaatatcacaccaaaagaggaacgtccagatgagttcttcagccacacagctgcctctgcattgatgatgacaatacaatggtgatacattgaaccttctggggta

SEQ ID NO: 77124 - DNA, 110 bp, synthetic construct
  source 1..110: mol_type = other DNA
cccaatttctcctagatgcaaactccacccacactccagagccctacaactctatccagcaaatgtttgatttgattttgtacaggaacttgcttctgagccatggaatt

SEQ ID NO: 77125 - DNA, 110 bp, synthetic construct
  source 1..110: mol_type = other DNA
catttctcagtaaatgcccaccaaaagattaaatgtaaaagaagatggaagacatggaactatgtctcatgacgtttataaattcatcgggaaagaaaacatgaccaaaa

SEQ ID NO: 77126 - DNA, 110 bp, synthetic construct
  source 1..110: mol_type = other DNA
tgaaccctgtattggtttcctgggccaccataactacgcacaacaaatgtagaggcttaaaacaaacaggaaataatttctcacagtttcagaggctagagtccaaaatc

SEQ ID NO: 77127 - DNA, 110 bp, synthetic construct
  source 1..110: mol_type = other DNA
tagggtcacttggcaggagccatagcctcagagggacacagacactgtcagaatttcaatgctgagagctggaggaggcaaggaagaaacaccctctctctcctgttgcc

SEQ ID NO: 77128 - DNA, 110 bp, synthetic construct
  source 1..110: mol_type = other DNA
ctcactttaaagatatagggcttgagtttcagcccctacttttctgtttcttagctttgtgaatttggccaacattttatttctgatggggggctacaatatttacaatt

SEQ ID NO: 77129 - DNA, 110 bp, synthetic construct
  source 1..110: mol_type = other DNA
agagggctacaatgtatctggcaccacccaaagtcctgaatgatagcttagtgaattcaccccatctcccctttcctcttattagactgtgggctgcttgtagatccata

SEQ ID NO: 77130 - DNA, 110 bp, synthetic construct
  source 1..110: mol_type = other DNA
aagaaactgaaatgggatatggggaaattaacatggaaatcacattgcaggcacttgacaaaactaattaaactgggaaatgcggctggatttttttttttttttttttt

SEQ ID NO: 77131 - DNA, 110 bp, synthetic construct
  source 1..110: mol_type = other DNA
tgacaaaactaattaaactgggaaatgcggctggatttttttttttttttttttttttttttttggtgcataaacattcttctcttgcaacaagggggtaaaaccgacaa

SEQ ID NO: 77132 - DNA, 110 bp, synthetic construct
  source 1..110: mol_type = other DNA
catacagcaggtagccttttatgtctggcttttttgacctggcacgatgctttcaaaatggtctgttttggggttccctggtggcctagccagtgaaggatccagtgttg

SEQ ID NO: 77133 - DNA, 110 bp, synthetic construct
  source 1..110: mol_type = other DNA
atgagcagacactatgtaaaagactatgggtgttaataaagatgataggccactgcttgtgaccactgtgctctcataatttagtacaattttttttttttttttttttt

SEQ ID NO: 77134 - DNA, 110 bp, synthetic construct
  source 1..110: mol_type = other DNA
taggccactgcttgtgaccactgtgctctcataatttagtacaattttttttttttttttttttttttttgtcttttgaaggccgcacccacggcatatggagtttccca

SEQ ID NO: 77135 - DNA, 110 bp, synthetic construct
  source 1..110: mol_type = other DNA
tgtgttgtggtcagcaagggaacagctctgcttccccttcatctatgcacaccgcctctccatctatgtcagtgtctccctggctgacgttgctatgtttgctggccggt

SEQ ID NO: 77136 - DNA, 110 bp, synthetic construct
  source 1..110: mol_type = other DNA
atcttgttgaggaaatagactccccaaagagacaaaaacaaaatgcaaaagggtaaacaaaatgtccaaggagggtcaagacgctcttctggaagggaagtaatgtgatt

SEQ ID NO: 77137 - DNA, 110 bp, synthetic construct
  source 1..110: mol_type = other DNA
aacaaaatgtccaaggagggtcaagacgctcttctggaagggaagtaatgtgattggagaaagcttaagactggaatatcatggagccttggaaagccttggaacaccag

SEQ ID NO: 77138 - DNA, 110 bp, synthetic construct
  source 1..110: mol_type = other DNA
ctacctatcattcatctgtacattggctcgaagtgtttgccttgagcatggtcggtggcttctgagatcaatttggttttcaaatctaactccaccaattagaagctttg

SEQ ID NO: 77139 - DNA, 110 bp, synthetic construct
  source 1..110: mol_type = other DNA
tggcttctgagatcaatttggttttcaaatctaactccaccaattagaagctttgactcttccaacagtttggagaatttctctgagcctttacttcctcttctataaaa

SEQ ID NO: 77140 - DNA, 110 bp, synthetic construct
  source 1..110: mol_type = other DNA
aatctcagtgccaccaacatatgagcttggtggctttgataggtaattcacttctcaatgcctctgtgtggcccatctcagaactgttatgggagttaaataagtagaac

SEQ ID NO: 77141 - DNA, 110 bp, synthetic construct
  source 1..110: mol_type = other DNA
tcttgggagcagaggtgaacaccaaccctcacacttcctatgggaagcagaggcccagcagagaagagacgtgacattctgctatggagggaggtgctgtgacccttgtc

SEQ ID NO: 77142 - DNA, 110 bp, synthetic construct
  source 1..110: mol_type = other DNA
acagaaagctctgagagcttaaaatatgaagtattgataggagttaggggtcaggaagggttttccttctggaagaacacttaaactgagatctgaagggtgaataggct

SEQ ID NO: 77143 - DNA, 110 bp, synthetic construct
  source 1..110: mol_type = other DNA
aagggttttccttctggaagaacacttaaactgagatctgaagggtgaataggctcgaccagatgaatagacgagggaagagtctttcgggccaggagaacagtgtgtgc

SEQ ID NO: 77144 - DNA, 110 bp, synthetic construct
  source 1..110: mol_type = other DNA
ctagtgagagaaaggggtcctgggaagaacactgtgtacgagtcacgcctgatcctacctacctaaaccaccaactcactgtgtaacccaggcatgtcccttcatctgtc

SEQ ID NO: 77145 - DNA, 110 bp, synthetic construct
  source 1..110: mol_type = other DNA
tacctacctaaaccaccaactcactgtgtaacccaggcatgtcccttcatctgtccccaaggactgggctgtcaccaccattttcatatatccaatttgagctgaattta

SEQ ID NO: 77146 - DNA, 110 bp, synthetic construct
  source 1..110: mol_type = other DNA
caatacctgacagtactgatgctgtgttatcctgcgtagctactactttcattttcatcacttggtagcccacaggactaagattaccattatccagaaaatctatgcct

SEQ ID NO: 77147 - DNA, 110 bp, synthetic construct
  source 1..110: mol_type = other DNA
agtctttaatccattctgagttaatttttatgagagaaggttccaatttccttaccctccatgtgttcctccagttttaccagcacaattggttgaagagacaatccttt

SEQ ID NO: 77148 - DNA, 110 bp, synthetic construct
  source 1..110: mol_type = other DNA
tactagcaaggttcattatcactgagcgagaactttgcttttcccttttaaatgtaatagttcgcatctactacccccaaacgtccaggctatcccactgtctctcccaa

SEQ ID NO: 77149 - DNA, 110 bp, synthetic construct
  source 1..110: mol_type = other DNA
aatagttcgcatctactacccccaaacgtccaggctatcccactgtctctcccaatccctttggcaacctcaagtcttttctccatgttggtgactctgtttctgttctg

SEQ ID NO: 77150 - DNA, 110 bp, synthetic construct
  source 1..110: mol_type = other DNA
actgaagggggaaaaatcctgtttatcctatttgtctctgaattagtctccctagaaagcagaataagagggaatcagagctaaaaaaggctttatagatcaggtccccc

SEQ ID NO: 77151 - DNA, 110 bp, synthetic construct
  source 1..110: mol_type = other DNA
atgtgtgtgaggttttgccacaccaactagttctccaactcttcagacaccaactggatgccctacagttcagttctgacactacccagaattagtgtccgtatccactt

SEQ ID NO: 77152 - DNA, 110 bp, synthetic construct
  source 1..110: mol_type = other DNA
ggatgccctacagttcagttctgacactacccagaattagtgtccgtatccacttcagttacaagtgtcgggtgcccaggtcgctcacatttctgtctgagttggttaca

SEQ ID NO: 77153 - DNA, 110 bp, synthetic construct
  source 1..110: mol_type = other DNA
cccaatatggtgatggtacacaatggtaccatgtcaccctaggctggattcagctaatgtgcagtgtttgtgtggggctggcaaagactattaggtgaccatggtggttt

SEQ ID NO: 77154 - DNA, 110 bp, synthetic construct
  source 1..110: mol_type = other DNA
aatgtgcagtgtttgtgtggggctggcaaagactattaggtgaccatggtggtttgacagctctctgtgccaaatccagcttccctctctttacaccccatgtgttaact

SEQ ID NO: 77155 - DNA, 110 bp, synthetic construct
  source 1..110: mol_type = other DNA
gtagcagagagctataacacacttttgaaaaagagctcttagtattctgttgatgtgaatataaagagagcaacttattccaggacatcaaggaagtttgtatccacaac

SEQ ID NO: 77156 - DNA, 110 bp, synthetic construct
  source 1..110: mol_type = other DNA
tctcgagaactcaagagcgagactctgaaacacagagctgggggagaggctccacagaagccaggtggagaaaatgtacctgactccatcacagtaactgcagtgtccca

SEQ ID NO: 77157 - DNA, 110 bp, synthetic construct
  source 1..110: mol_type = other DNA
aagaaatgacctgtcactgtgtctatatcccctctcaagtttaagttctttgaagttcaagcttaaccatgccttagccatctccatacccccaacacctcacacagtga

SEQ ID NO: 77158 - DNA, 110 bp, synthetic construct
  source 1..110: mol_type = other DNA
gcaaaggctttcaggactcagctcttcactcactcgttgcatgacttgatcacggtcttagttcaggctgtgataacaacatacctctgacagggtgactttaacaacaa

SEQ ID NO: 77159 - DNA, 110 bp, synthetic construct
  source 1..110: mol_type = other DNA
acctcatggttgttggtcagattcattaaacactgagccatgacgggaactccagcttctttctgtctgtctttctctctctctctttctttcattctttctctctctct

SEQ ID NO: 77160 - DNA, 110 bp, synthetic construct
  source 1..110: mol_type = other DNA
cttctttctgtctgtctttctctctctctctttctttcattctttctctctctctctctctctctctctctctctcttccttccctttcactgtagccatcctagtgggt

SEQ ID NO: 77161 - DNA, 110 bp, synthetic construct
  source 1..110: mol_type = other DNA
aataccgagttctagctcctgaccctgctcagggattttcctgcttgctgggggctgggaagcagggacatttgagctgggcattgatggatgactaggagttctatagg

SEQ ID NO: 77162 - DNA, 110 bp, synthetic construct
  source 1..110: mol_type = other DNA
tgggaagcagggacatttgagctgggcattgatggatgactaggagttctataggtagatacagggaaggcagtgggggagtttgctgagcaaagaaagtagaagtagcg

SEQ ID NO: 77163 - DNA, 110 bp, synthetic construct
  source 1..110: mol_type = other DNA
gttcccatttgtgaaatgagaaaataatatttaccttacagaactgctatatcaatccaatgaagtcacagatgtgaaagcactttgtaaggagagggttttttgttgtt

SEQ ID NO: 77164 - DNA, 110 bp, synthetic construct
  source 1..110: mol_type = other DNA
tggaaactcctcacctctcttaactcttaaccttaactgtctaaacaacaattttgcaatggagcacataaaattttgtaccactatttattaatttcttatgttacgat

SEQ ID NO: 77165 - DNA, 110 bp, synthetic construct
  source 1..110: mol_type = other DNA
gcaatggagcacataaaattttgtaccactatttattaatttcttatgttacgattccctaatagggagttccaggagggctcatacttggatctttcttatgctcccta

SEQ ID NO: 77166 - DNA, 110 bp, synthetic construct
  source 1..110: mol_type = other DNA
cgttgtttgtcagttggctgagaggcagcagtacgggtcttgggctttgaagtctgagcaatctgggtttgaattgtggcccgtctcttacagacccagggcctagtgga

SEQ ID NO: 77167 - DNA, 110 bp, synthetic construct
  source 1..110: mol_type = other DNA
gagcaatctgggtttgaattgtggcccgtctcttacagacccagggcctagtggaaggcacctatctctctaagcctcagcttatttcatctggaaaatggctgtaatga

SEQ ID NO: 77168 - DNA, 110 bp, synthetic construct
  source 1..110: mol_type = other DNA
ctgtctctgtcaagtccatgtgcttcattttggcatgagttctaccccattaaggcttcatcacagttattctttcctttttgtcacttcgccacatttgaaaatgtctt

SEQ ID NO: 77169 - DNA, 110 bp, synthetic construct
  source 1..110: mol_type = other DNA
tgagttctaccccattaaggcttcatcacagttattctttcctttttgtcacttcgccacatttgaaaatgtcttaacagttagtatattttcatactattataattagc

SEQ ID NO: 77170 - DNA, 110 bp, synthetic construct
  source 1..110: mol_type = other DNA
acgagggaggagacgggccgccctgagagttcaaagagaagggccgggacagccctgggacaggccaaatattttgaggttgcgtgcctttctgctgtcccttctaccac

SEQ ID NO: 77171 - DNA, 110 bp, synthetic construct
  source 1..110: mol_type = other DNA
tgggacaggccaaatattttgaggttgcgtgcctttctgctgtcccttctaccacagttctctccccctgaggcctctggctgaaatcctgttacccttcctggcccttc

SEQ ID NO: 77172 - DNA, 110 bp, synthetic construct; identical to SEQ ID NO: 77170
  source 1..110: mol_type = other DNA

SEQ ID NO: 77173 - DNA, 110 bp, synthetic construct; identical to SEQ ID NO: 77171
  source 1..110: mol_type = other DNA

SEQ ID NO: 77174 - DNA, 110 bp, synthetic construct
  source 1..110: mol_type = other DNA
gccaatatacattcccaccaacagtgtattagtattcccttttcttcacctccttgccaatacttgttatttcgtgtcttttttgcaatagccattttaacagtcgtgtg

SEQ ID NO: 77175 - DNA, 110 bp, synthetic construct; identical to SEQ ID NO: 77174
  source 1..110: mol_type = other DNA

SEQ ID NO: 77176 - DNA, 110 bp, synthetic construct
  source 1..110: mol_type = other DNA
cctgaaataaccactgaaactgatgaaacttctagcaagactgaataggagggagcagcgcaggtcattaacaccgtgaatgaaaaaaaaaaaaaagacatcatgataga

SEQ ID NO: 77177 - DNA, 110 bp, synthetic construct
  source 1..110: mol_type = other DNA
tcatcccactttcccctttggtggccataaatttgttttccatgtctgtgaaataatgtctggagatattttttattgccacaagtgtgcaggaggagtgctagtggcat

SEQ ID NO: 77178 - DNA, 110 bp, synthetic construct
  source 1..110: mol_type = other DNA
agaggtctggggtgaagacagctctttggaagtcattaccacgccagcattcgtgggctcagccgtggttgagatgggctaggaagggactacacagagggaagcgaagg

SEQ ID NO: 77179 - DNA, 110 bp, synthetic construct
  source 1..110: mol_type = other DNA
ccttcttttctttaaggcttacccgaagtctcatctccttcacaaagcattctcaggctggaataatttcttttgaaataccatatgataacataccacttagtctgcac

SEQ ID NO: 77180 - DNA, 110 bp, synthetic construct
  source 1..110: mol_type = other DNA
ggctggaataatttcttttgaaataccatatgataacataccacttagtctgcacagcttttttttttgcagttatgatcctgccttcactgatcacaaagaagcctatt

SEQ ID NO: 77181 - DNA, 110 bp, synthetic construct; identical to SEQ ID NO: 77179
  source 1..110: mol_type = other DNA

SEQ ID NO: 77182 - DNA, 110 bp, synthetic construct; identical to SEQ ID NO: 77180
  source 1..110: mol_type = other DNA

SEQ ID NO: 77183 - DNA, 110 bp, synthetic construct
  source 1..110: mol_type = other DNA
tttgctggcttgtgttgttgccgaaccttattcttttagatctgttctaaaaataggtacagtagagccattactgctcagatcttttggccatggtaatactgtagttg

SEQ ID NO: 77184 - DNA, 110 bp, synthetic construct
  source 1..110: mol_type = other DNA
cttacaataacattaagaataatgaaatactgagaagtaaatgtagccaaggaagccaaggccttgtactctgaaaactaaaactattgctgaaagaaattaagaagacc

SEQ ID NO: 77185 - DNA, 110 bp, synthetic construct
  source 1..110: mol_type = other DNA
tattaaacactacttgaatgtgtgtgaagtttacacacccttcttcaaccctgccttggaaggttcttcttgctcagtcccatgaaatcctagcctaaaggcccccttcc

SEQ ID NO: 77186 - DNA, 110 bp, synthetic construct
  source 1..110: mol_type = other DNA
ttggaaggttcttcttgctcagtcccatgaaatcctagcctaaaggcccccttcctaggcaaggcctcagctagttagcactgttcacgcatgccattctgttctactga

SEQ ID NO: 77187 - DNA, 110 bp, synthetic construct
  source 1..110: mol_type = other DNA
ttgccgtaattctggctaccatcatcatcatctgtaacgtggactattgaaataggcctccttcatctccttgactccttaacaggcagtaggtagagtaataggtagag

SEQ ID NO: 77188 - DNA, 110 bp, synthetic construct
  source 1..110: mol_type = other DNA
gcctccttcatctccttgactccttaacaggcagtaggtagagtaataggtagaggtagtgatctctcatacccctagttaacagtctcagtgatgcaaaactcaactct

SEQ ID NO: 77189 - DNA, 110 bp, synthetic construct
  source 1..110: mol_type = other DNA
ccggaagcatttgtttacatcaaaccattcagtgtgtggtagatcacaatactcttaatgtcaatgcctaaaataaacgaataaatgcacagtgtctgctctgggcttgg

SEQ ID NO: 77190 - DNA, 110 bp, synthetic construct
  source 1..110: mol_type = other DNA
actttgtttcagaactgggatccagacggtgggtctcagatgaaagggggcttgggagtgtttcttgaccaagttgagtatgtgggtgtggtgtggtagagtgggttttt

SEQ ID NO: 77191 - DNA, 110 bp, synthetic construct
  source 1..110: mol_type = other DNA
gagtgtttcttgaccaagttgagtatgtgggtgtggtgtggtagagtgggtttttactacgcctttagatctgcattcatcagtactgtggggattgctctcctatgagt

SEQ ID NO: 77192 - DNA, 110 bp, synthetic construct
  source 1..110: mol_type = other DNA
actgtgccacaacgggaactcctgtacatagacatctttgggaggttgttattcaaaggtaccacaaggacccagtgttctgagagcttcggacttggtacttgtggaca

SEQ ID NO: 77193 - DNA, 110 bp, synthetic construct
  source 1..110: mol_type = other DNA
aaggtaccacaaggacccagtgttctgagagcttcggacttggtacttgtggacaaagccaaagtctacctacatcagaatctcccctcccccaacaactgcctaccgcc

SEQ ID NO: 77194 - DNA, 110 bp, synthetic construct
  source 1..110: mol_type = other DNA
tgttccctgtcgtagtcccaatacttcacgtggtgactggaagttaaatatttcattttttaaacgcaattcctctctccttctctcttgaacttaactccagattgtca

SEQ ID NO: 77195 - DNA, 110 bp, synthetic construct
  source 1..110: mol_type = other DNA
catgagctaggagagaatttaacagagatttctcagttgtgtaatcctgggtgcttgaccccagctgtaacaaaggcaaaaccacagactaggggcccggcttatttcca

SEQ ID NO: 77196 - DNA, 110 bp, synthetic construct
  source 1..110: mol_type = other DNA
tgaccccagctgtaacaaaggcaaaaccacagactaggggcccggcttatttccagggaccaggcttggctgatggttccctaatagtataactaggactcattattcct

SEQ ID NO: 77197 - DNA, 110 bp, synthetic construct
  source 1..110: mol_type = other DNA
cggggctgctgccacggctgctgcaggacctcagatgactgtcagcacggcgtactcacgcccggcccgcctgtgggaactcctgcgataagcagcccaggacccggagg

SEQ ID NO: 77198 - DNA, 110 bp, synthetic construct
  source 1..110: mol_type = other DNA
tcatccagcctgggaacccagagtagggtgaagcacaggatgctctggctcgcccactcctccctgctgccaccagcacctcattctcctaagggcaaccaatgtcatgc

SEQ ID NO: 77199 - DNA, 110 bp, synthetic construct
  source 1..110: mol_type = other DNA
actcctccctgctgccaccagcacctcattctcctaagggcaaccaatgtcatgccctgatttatcaggatcatttgctgctctcccacaccttgatcccgactttcctc

SEQ ID NO: 77200 - DNA, 110 bp, synthetic construct
  source 1..110: mol_type = other DNA
aacccacaacctcatggttcttagttgtattcgtttctgctgtgccatgatgggaactctgggatgtaggtttgatctctggccctgctcagtggcttaaggatcaggcg

SEQ ID NO: 77201 - DNA, 110 bp, synthetic construct; identical to SEQ ID NO: 77200
  source 1..110: mol_type = other DNA

SEQ ID NO: 77202 - DNA, 110 bp, synthetic construct
  source 1..110: mol_type = other DNA
gctctgcccgccggaggcccagtgaggaggaagatgtggccctgctttgggaagacccagcgtatgtgtacctgcaagtgtgcgtgtgtggcagcggagtcctgttctgt

SEQ ID NO: 77203 - DNA, 110 bp, synthetic construct
  source 1..110: mol_type = other DNA
cccagcgtatgtgtacctgcaagtgtgcgtgtgtggcagcggagtcctgttctgtcctcaaaaggccccaaaagtggcataaagcttccaggtctaaggaaaagacaggt

SEQ ID NO: 77204 - DNA, 110 bp, synthetic construct
  source 1..110: mol_type = other DNA
aaggaagagagttgtgtttagagtgattattctctacttaacgttttctcttcggaaagctgatatgggctattttggccctttcgcaaggatgttataggaaggattca

SEQ ID NO: 77205 - DNA, 110 bp, synthetic construct
  source 1..110: mol_type = other DNA
ttatcagagtttcagtctcatattagcagctgccccatgaaaatctcctgatcacctcaaacttgagacctccaaaagtgaaatcaaaccttcttggaaaaaaggttccc

SEQ ID NO: 77206 - DNA, 110 bp, synthetic construct
  source 1..110: mol_type = other DNA
ctcaaacttgagacctccaaaagtgaaatcaaaccttcttggaaaaaaggttcccctgagcctggcatgggcaccactgtttcttactctaccaaatttatcgtcaagca

SEQ ID NO: 77207 - DNA, 110 bp, synthetic construct
  source 1..110: mol_type = other DNA
aacagaggaactagcaaagagtagaagcagctgaatccagcgagtcgaaggagatcccaaaggccccaagtttctaggggcgaagggtgatgaatggctgagccacggag

SEQ ID NO: 77208 - DNA, 110 bp, synthetic construct
  source 1..110: mol_type = other DNA
cccaaaggccccaagtttctaggggcgaagggtgatgaatggctgagccacggaggcagccagcgcaataagtggtctcacgccggctcgttccctcagatgacgggatc

SEQ ID NO: 77209 - DNA, 110 bp, synthetic construct
  source 1..110: mol_type = other DNA
agagaagacgagccagccaaactgggctgtgcagggcgaaaagacagtggcatttgtcccgcaggtcctggcgctgcctggttttgtgtggaagcagctctctggggagg

SEQ ID NO: 77210 - DNA, 110 bp, synthetic construct
  source 1..110: mol_type = other DNA
agggatcaaaccaacacttccacagaggcaagccagatcattaacccttgtgccacagtgggaactcccttgtcacacactaaagccactcactgggttaagagttttct

SEQ ID NO: 77211 - DNA, 110 bp, synthetic construct
  source 1..110: mol_type = other DNA
cagtgggaactcccttgtcacacactaaagccactcactgggttaagagttttcttctgtctgtctccatttgaagaacagggatcaagactgacttatcctggcatcta

SEQ ID NO: 77212 - DNA, 110 bp, synthetic construct
  source 1..110: mol_type = other DNA
ttcccccccaccctgtacccccaccagaccaggagctcccttgagggcaggccactggtcttagaatcatcttgttcctcgctgttcccagagtaggtgtggtttttaat

SEQ ID NO: 77213 - DNA, 110 bp, synthetic construct
  source 1..110: mol_type = other DNA
tccaacaagaccaaagccaggctcttctgctgagcttccagaccccatccgtccatctggacccaaactggtgttgtagcatcctagaagacgcacgaaggaagggcttt

SEQ ID NO: 77214 - DNA, 110 bp, synthetic construct
  source 1..110: mol_type = other DNA
tcccctctcacctctgggccaaaatgtacaaagtttattctgcttagaaagctcgttgtcttatttttatgaaaatgtctccctaccccagcccccttgcccagggaact

SEQ ID NO: 77215 - DNA, 110 bp, synthetic construct
  source 1..110: mol_type = other DNA
gtatttcagctaacttttctcactcacttttttcatctggaaatcctctaatggttacattggagaggatgcatgggcagcttttgcctttctggtcgattttctctctc

SEQ ID NO: 77216 - DNA, 110 bp, synthetic construct
  source 1..110: mol_type = other DNA
tacattggagaggatgcatgggcagcttttgcctttctggtcgattttctctctctttccaccgtgctctgtgccccccaaaggctgatctttcagaagtgcatcaattg

SEQ ID NO: 77217 - DNA, 110 bp, synthetic construct
  source 1..110: mol_type = other DNA
ttatgacgttcatctcagcagcagcagcagcagcagcaacatcactaaaccaccgcccaaatctcagcgcacagcaggcatctactttgaggagctcctttgctgtgacc

SEQ ID NO: 77218 - DNA, 110 bp, synthetic construct
  source 1..110: mol_type = other DNA
cccaaatctcagcgcacagcaggcatctactttgaggagctcctttgctgtgaccttgtttacggaatgaagggcccttctctgccttggtgagctattgggatgggtcg

SEQ ID NO: 77219 - DNA, 110 bp, synthetic construct
  source 1..110: mol_type = other DNA
gcctgcggggagttttaggatgggctgggcagaatcgaggttagaatcagggagatctggctctgaatcctgggagaggactttggcaaattcggttttctctttgaaga

SEQ ID NO: 77220 - DNA, 110 bp, synthetic construct
  source 1..110: mol_type = other DNA
tctggctctgaatcctgggagaggactttggcaaattcggttttctctttgaagatccgtgttcccataaacgtgtgtgattatgatgtctctgacacctcatgtcgaga

SEQ ID NO: 77221 - DNA, 110 bp, synthetic construct
  source 1..110: mol_type = other DNA
gatggcaaaaggaagaacaccactactggcctttggccaatcaggattcagcccggggggctagggaggaggtctcttccccgagcatatgattgtgccacgaggactgt

SEQ ID NO: 77222 - DNA, 110 bp, synthetic construct
  source 1..110: mol_type = other DNA
gggggctagggaggaggtctcttccccgagcatatgattgtgccacgaggactgtgccagcaaggaaggactgggtgtgggaattctaccagggtgactgcattggggaa

SEQ ID NO: 77223 - DNA, 110 bp, synthetic construct; identical to SEQ ID NO: 77221
  source 1..110: mol_type = other DNA

SEQ ID NO: 77224 - DNA, 110 bp, synthetic construct; identical to SEQ ID NO: 77222
  source 1..110: mol_type = other DNA

SEQ ID NO: 77225 - DNA, 110 bp, synthetic construct
  source 1..110: mol_type = other DNA
ttcgcactcacatcctgcctcaaaccggctccctcctctgcctgacgttttctcaccacaagacctcgaggtccctctccccagaattgctttgcctaatactgactttt

SEQ ID NO: 77226 - DNA, 110 bp, synthetic construct
  source 1..110: mol_type = other DNA
ccacaagacctcgaggtccctctccccagaattgctttgcctaatactgacttttccagagtctcctctgcagcctcagttccctttagaactgctctgaagtaacagcc

SEQ ID NO: 77227 - DNA, 110 bp, synthetic construct
  source 1..110: mol_type = other DNA
ctgtggcagtgccggatcctttaacccactgcattagatcaaggatcaaacccaagccttcaccgcaacctgagccgctgtggtcagattcttcacccactgtgctaccg

SEQ ID NO: 77228 - DNA, 110 bp, synthetic construct; identical to SEQ ID NO: 77227
  source 1..110: mol_type = other DNA

SEQ ID NO: 77229 - DNA, 110 bp, synthetic construct
  source 1..110: mol_type = other DNA
ggtttcttcactatattacaagctacatggtgcaggtcagcatctctgcgggcatcctccaacacctgagaaccacagagatgtcagcaattacgtatttgaagtcacag

SEQ ID NO: 77230 - DNA, 110 bp, synthetic construct
  source 1..110: mol_type = other DNA
ggcaaactgctttattcgtaaaccaagcatcccagtttgtcttctagtaaccacgataaaaagtgaaagcaaagctggtttgaccatttcaacggtcaacacagtaactg

SEQ ID NO: 77231 - DNA, 110 bp, synthetic construct
  source 1..110: mol_type = other DNA
actggccagcactgctgtcaatctcaccacctgacccaatctcctggctcctattggctagctctctatcacttctccgttctcattggctcttaggtggctaattcggc

SEQ ID NO: 77232 - DNA, 110 bp, synthetic construct
  source 1..110: mol_type = other DNA
cttccaggttcgctttggtttcctccctttaacacagcaggaaccacaccaccaatttctaataacaatagctatgatttattagacacttgctgggtgccaagtaagta

SEQ ID NO: 77233 - DNA, 110 bp, synthetic construct
  source 1..110: mol_type = other DNA
tagcagccagggttagccttccctcaagagcagttctgaaatatttgaaaggtaaattcttaactcaaatatggggagaatctaggcaaagtaaatgcagtggaagctaa

SEQ ID NO: 77234 - DNA, 110 bp, synthetic construct
  source 1..110: mol_type = other DNA
attcttaactcaaatatggggagaatctaggcaaagtaaatgcagtggaagctaaccattctacaggcactctatcttggggaagtgtccttctctcctactctcactaa

SEQ ID NO: 77235 - DNA, 110 bp, synthetic construct
  source 1..110: mol_type = other DNA
gaacctacgtgaaagaagaaacttctgcaagtacaaattatatgacagagtgagtcccgaatgaagaggtgaggacagctgggtggcactgaagagggaagacttcctgg

SEQ ID NO: 77236 - DNA, 110 bp, synthetic construct
  source 1..110: mol_type = other DNA
cccgaatgaagaggtgaggacagctgggtggcactgaagagggaagacttcctggaggagaagttttgagctaatattttaaaaattaatacaattaataaaatttattg

SEQ ID NO: 77237 - DNA, 110 bp, synthetic construct
  source 1..110: mol_type = other DNA
tgccctctcgccccacccccggggtcacagaatcccctctgagccggaagcagggagtctgcctgtgacactcatggcttatgatctccttacattgtgggtcagatcct

SEQ ID NO: 77238 - DNA, 110 bp, synthetic construct
  source 1..110: mol_type = other DNA
ggaccgttagtctgcctaccacccgtgatactatagttcaccaatttttgcaaagccaaatactctggaatactaataaaaatggtcacgaaagtgctaatgatttttaa

SEQ ID NO: 77239 - DNA, 110 bp, synthetic construct
  source 1..110: mol_type = other DNA
ccaaatactctggaatactaataaaaatggtcacgaaagtgctaatgatttttaagaaataaagaagcatgaagaggcaatgtctaatcaggggcatcttcacaaagagg

SEQ ID NO: 77240 - DNA, 110 bp, synthetic construct; identical to SEQ ID NO: 77238
  source 1..110: mol_type = other DNA

SEQ ID NO: 77241 - DNA, 110 bp, synthetic construct; identical to SEQ ID NO: 77239
  source 1..110: mol_type = other DNA

SEQ ID NO: 77242 - DNA, 110 bp, synthetic construct
  source 1..110: mol_type = other DNA
gtttcccattctgcctttctcaggattccttcactgtctggtaatttagtctctatccttgttgtcacatgtggctgcattaattctagaccttacatcattgatagaag

SEQ ID NO: 77243 - DNA, 110 bp, synthetic construct
  source 1..110: mol_type = other DNA
accaggaaggggcaaaaggccggatctacgtgtgagaccacagtgcagttcactgcagcatcccaagctcctggtgttcacgctgggtttgaagtagcaaagagagaggg

SEQ ID NO: 77244 - DNA, 110 bp, synthetic construct
  source 1..110: mol_type = other DNA
ggggagattgagtgacttcatacgtgcaaagcgcttagaaacagctcataaggtttattacacgtctaagaggccgctggggctccgagaggtgaagtaacttgtctgag

SEQ ID NO: 77245 - DNA, 110 bp, synthetic construct
  source 1..110: mol_type = other DNA
tgtgtatacgcaatagagcttgtgtgtgtttatgcatgcactcgtgtgctttgtgtgtctgtgtggggacctctgcttgccggcggacatacacaggagaatttttgcaa

SEQ ID NO: 77246 - DNA, 110 bp, synthetic construct
  source 1..110: mol_type = other DNA
aattcaggtttatcttcattaagcaagtaattcattaccgggcggtaagcatttacatcagagtgagaatattaaaaaagtaattatatttttcacagtgcagctttctg

SEQ ID NO: 77247 - DNA, 110 bp, synthetic construct
  source 1..110: mol_type = other DNA
cagcccagctgctggctgaatgcagcactatgagtgggcccagccaataccacgtagagtagaagaaagagcctgggaaacccatgatatcttgagaaataacaaaccga

SEQ ID NO: 77248 - DNA, 110 bp, synthetic construct
  source 1..110: mol_type = other DNA
agagtagaagaaagagcctgggaaacccatgatatcttgagaaataacaaaccgattctgttttgttttggtttttggtttttttgtcttttgtccttttagggctgcac

SEQ ID NO: 77249 - DNA, 110 bp, synthetic construct
  source 1..110: mol_type = other DNA
ctcaaacacctgaaacagctgaggaggcaagcaccccttcctccctcctctccaccgtcccaaggaaagctctcgatgcctcacctgaggaaccaggctgacgtgaatgt

SEQ ID NO: 77250 - DNA, 110 bp, synthetic construct
  source 1..110: mol_type = other DNA
cccagagtcagacgggattcaagtctcagcaagatcgcgtcccagctgggaggtcttgggcgaattacctcacctctctgtgccccccttggctcatctctgagatggga

SEQ ID NO: 77251 - DNA, 110 bp, synthetic construct
  source 1..110: mol_type = other DNA
agggagagggctaaggatttaggctcagaataggcctttgcttgtctagtcaaccattcattccttctctccttcatttactccctcattctctcattcattcactcact

SEQ ID NO: 77252 - DNA, 110 bp, synthetic construct
  source 1..110: mol_type = other DNA
agtcactgtatccatcccgcattcacggagaggggaatttgaagtggtctgtccatagctgccgacatatttggaaaccactacaatgcaatggagtagtcagaagagaa

SEQ ID NO: 77253 - DNA, 110 bp, synthetic construct
  source 1..110: mol_type = other DNA
tagctgccgacatatttggaaaccactacaatgcaatggagtagtcagaagagaaaggcaatgtttgagcaaaaacttagaggaagcagggaattagcaatggttctggc

SEQ ID NO: 77254 - DNA, 110 bp, synthetic construct
  source 1..110: mol_type = other DNA
gtgaagctgggacacaagggtcagcatacagagttgaggggcttcctgggcgttctgtacctggataaggttggctgctggcatcctccgcttctcgaaatgtttctgcc

SEQ ID NO: 77255 - DNA, 110 bp, synthetic construct
  source 1..110: mol_type = other DNA
actcctgctcacactgcgcagccagctgctctggacacggcaagagattccacggcaaaggcaaacaccgagacccggactctgttaagacctggatcttaacggaagcc

SEQ ID NO: 77256 - DNA, 110 bp, synthetic construct
  source 1..110: mol_type = other DNA
atgagaacttttttgggagagagacagagatgtgctgggcttgaagtcacaacggtgtgtcgatgtagagacgtcccaaacaccggggatatgtgggaatagagttcata

SEQ ID NO: 77257 - DNA, 110 bp, synthetic construct
  source 1..110: mol_type = other DNA
tgttagtaagtacagaatttttccatggctgtccttttctttagggatcctccagccctctagcaaatgttctcattcactcattcacttagcagattgtcactgagaaa

SEQ ID NO: 77258 - DNA, 110 bp, synthetic construct
  source 1..110: mol_type = other DNA
ctcagcacactgccacccaaccaggctccccatcccccttcaaatgctcaagagacgcctgtgcccactgcctgacatgaggcttcttggagcagagagtccctggtgtg

SEQ ID NO: 77259 - DNA, 110 bp, synthetic construct
  source 1..110: mol_type = other DNA
cgcctgtgcccactgcctgacatgaggcttcttggagcagagagtccctggtgtgcaggaaacaaccgatcaacctctgggtgcctgctttgggattgcactcaagacac

SEQ ID NO: 77260 - DNA, 110 bp, synthetic construct
  source 1..110: mol_type = other DNA
caggacggcgtgtgtgtcactggcatttccctgttgtgtttatgagatgaggtgggaatgggtgtcggggttactctaatcttgtcttttacaagaaacaagaagccccc

SEQ ID NO: 77261 - DNA, 110 bp, synthetic construct
  source 1..110: mol_type = other DNA
gaatgggtgtcggggttactctaatcttgtcttttacaagaaacaagaagcccccagtggaacacgggtggggggctgtgtggcctgggaggcggggggggaaaccccag

SEQ ID NO: 77262 - DNA, 110 bp, synthetic construct
  source 1..110: mol_type = other DNA
tcaagtggcatccgttttgaccagaagcagaagcaacgaggctccaaactacctcacgactaggctgcgggaccctgtggaagacgggcacgcgacggcagccgtgtcac

SEQ ID NO: 77263 - DNA, 110 bp, synthetic construct
  source 1..110: mol_type = other DNA
ccacactggcaggaccatatttccaggaaagctcagcgggaaccttctggatggcttcgacaaccagttctttctcacgggttgaggtagatggactgttggccagggtg

SEQ ID NO: 77264 - DNA, 110 bp, synthetic construct
  source 1..110: mol_type = other DNA
tcacagtctggtcacacgtgataaagaggcagaggacgcaggacctgccacaggatctgcagcctccgcctcgggttctcgcccagggatggaggcgaccagaggcgccc

SEQ ID NO: 77265 - DNA, 110 bp, synthetic construct
  source 1..110: mol_type = other DNA
cacttattcaaaaaatagcccaaacgagcagatgtgtggccgttcaaagactctgtctgcttgcaccccgccctgccccaaaacatcgctgacatttggtttgggcagaa

SEQ ID NO: 77266 - DNA, 110 bp, synthetic construct
  source 1..110: mol_type = other DNA
tctgcttgcaccccgccctgccccaaaacatcgctgacatttggtttgggcagaagcgagagaaagggaactgtgccgacgctgtcaggagagggtgtgcaacaaacctc

SEQ ID NO: 77267 - DNA, 110 bp, synthetic construct
  source 1..110: mol_type = other DNA
ctcatcctgtgcttggaaacacagacacaggctccacgaacacgcaccctcagtggttaagccgcacccgctggaatcctaaccaaggggaagcccaacccggaccttgg

SEQ ID NO: 77268 - DNA, 110 bp, synthetic construct
  source 1..110: mol_type = other DNA
gacagtggcacgcacgccttccggctgagggtaaatacactgtctcactctggtcgctcagccgggcctactctgggcattgcttacaaaacatcaagtggaaaacagaa

SEQ ID NO: 77269 - DNA, 110 bp, synthetic construct
  source 1..110: mol_type = other DNA
cctccacgaagccggtctcggtgccttctaagctgggagacgtctctggcgctcggggtgagcgcgaaaaaccgtcctgggcttagagcaagtgttcagtaaactcagcc

SEQ ID NO: 77270 - DNA, 110 bp, synthetic construct
  source 1..110: mol_type = other DNA
cggctcaggtgcgctgaaagcgctgagctgtcgccacgcgaaggcggcccccgttcacgtgacaacaccgagctagaagcctgtttagctcgaggagaggaagaggctgt

SEQ ID NO: 77271 - DNA, 110 bp, synthetic construct
  source 1..110: mol_type = other DNA
cacgtgacaacaccgagctagaagcctgtttagctcgaggagaggaagaggctgtgttctcacagcccagaggtcacctctcaacccggaccctctggcgatcaccggcc

SEQ ID NO: 77272 - DNA, 110 bp, synthetic construct
  source 1..110: mol_type = other DNA
cttaccctgcgaagcagaagctgagttcagcccgaagtctaaagcgcaaacagcccaggaagcaccaccacggccgggtctggggggtgccggccccctgccctttctcc

SEQ ID NO: 77273 - DNA, 110 bp, synthetic construct
  source 1..110: mol_type = other DNA
tcttttccccaggataaaatgcacgctggagccaggagatgttgctccagtgaatgacatttgggaaccggggtcaaaacagaactgtgacgtaatacatttttaagaag

SEQ ID NO: 77274 - DNA, 110 bp, synthetic construct
  source 1..110: mol_type = other DNA
cgataagcctcgtactcaccaggcacgatccacagtcaagactgaactgacgccgtaagcagaagagcgtgtgtccctgggacaggtctcagtggtgaacacggacacac

SEQ ID NO: 77275 - DNA, 110 bp, synthetic construct
  source 1..110: mol_type = other DNA
taagcagaagagcgtgtgtccctgggacaggtctcagtggtgaacacggacacactcaaagacacggcgcctacacctgtgtgagcccggctcacagaagacgcacaggg

SEQ ID NO: 77276 - DNA, 110 bp, synthetic construct
  source 1..110: mol_type = other DNA
agagcctcgatttaaagaaaagggctcgatcgacctgcaggtggggacttgaccttgcagtccctggccctccacccctggtgtctaactttgctcactgccggtcccgg

SEQ ID NO: 77277 - DNA, 110 bp, synthetic construct
  source 1..110: mol_type = other DNA
tgcagtccctggccctccacccctggtgtctaactttgctcactgccggtcccggtgctaagcacccgagcaaacatcttggtgaaaaacagaccagcacagtccttcat

SEQ ID NO: 77278 - DNA, 110 bp, synthetic construct
  source 1..110: mol_type = other DNA
tgtcatgttcgtgaaatatatctagggggtactaccagcataaaatgcttcactgtatttacaccttggaagaacacgttcaatgatctaaatgttaggttcaaaatttt

SEQ ID NO: 77279 - DNA, 110 bp, synthetic construct
  source 1..110: mol_type = other DNA
tatttacaccttggaagaacacgttcaatgatctaaatgttaggttcaaaattttaagtcagaaatatattttttggtccagaatatcaatcagaattgggtgtctgagt

SEQ ID NO: 77280 - DNA, 110 bp, synthetic construct
  source 1..110: mol_type = other DNA
ccaccaaccgcccaggtgaagcctcgaggccctggcgggcactgaggggtgggcggtcgcaggcctggaaacagcttcagcgttcatttccaatgtgaggccaaggctga

SEQ ID NO: 77281 - DNA, 110 bp, synthetic construct
  source 1..110: mol_type = other DNA
ctcatcttccagaactccaaaatcaatgtgactgaactttcgtttatgcttgatagtaggaaaaaatgacacatttccaaatttaattaaccaaaacaaaaattcctagg

SEQ ID NO: 77282 - DNA, 110 bp, synthetic construct
  source 1..110: mol_type = other DNA
tctgaaccatgaggtcaggcgtttatcatcactgtcattgccataagtttgtgaccacttgtgacagcagccgcaggaaacgacgtctacacggcagcacattttacaag

SEQ ID NO: 77283 - DNA, 110 bp, synthetic construct
  source 1..110: mol_type = other DNA
cacttgtgacagcagccgcaggaaacgacgtctacacggcagcacattttacaagtcccgttattacgaaatatttttctcctttgtttaagtcacggggtaaaatagag

SEQ ID NO: 77284 - DNA, 110 bp, synthetic construct
  source 1..110: mol_type = other DNA
gcacgcgcaggcggaggacaggcacttgtgcttgggtgctgaacagcagctccagctgcagttctactttctaaaacgctgacgtgggagcaagcgctcccatggaaggc

SEQ ID NO: 77285 - DNA, 110 bp, synthetic construct
  source 1..110: mol_type = other DNA
ctgcagttctactttctaaaacgctgacgtgggagcaagcgctcccatggaaggcctgcctggtcgtggacggatatttcctctgaaacttgctcaagtcaggagcagcc

SEQ ID NO: 77286 - DNA, 110 bp, synthetic construct
  source 1..110: mol_type = other DNA
ggtactgagagaacaggatcctcagactgatttagggctggagtctgaatgggaaaaaggaaagaccgggaccgaggggctctggcaccaggtcaggaacgagccgcgtc

SEQ ID NO: 77287 - DNA, 110 bp, synthetic construct
  source 1..110: mol_type = other DNA
tgaatgggaaaaaggaaagaccgggaccgaggggctctggcaccaggtcaggaacgagccgcgtcctggccgcgggctgcagaccggggagggcaggagtgagggccagg

SEQ ID NO: 77288 - DNA, 110 bp, synthetic construct
  source 1..110: mol_type = other DNA
agggtctgcgataagcagacagcaatgacagcaataagcattttctaggtgccatgccctgagcagcccatcatgcggtaaagagtatttctattactttcatttcatag

SEQ ID NO: 77289 - DNA, 110 bp, synthetic construct
  source 1..110: mol_type = other DNA
cgggggctgtgtcctgcgacctgtggaacagacacgtccccagaccagtcacgtcgccgtcccagttcctaccatctcttccagtgcctccccagtttcttcctgtgagc

SEQ ID NO: 77290 - DNA, 110 bp, synthetic construct
  source 1..110: mol_type = other DNA
gccgtcccagttcctaccatctcttccagtgcctccccagtttcttcctgtgagcttccagacagcgagcattcaccggatgcttgccatcttctgggcgctgttgggac

SEQ ID NO: 77291 - DNA, 110 bp, synthetic construct
  source 1..110: mol_type = other DNA
actggagaagatgaatatacattgtgaagttcattgcaagaataaagtgccacggaaatgcctcgtgacggggcggtgaaagtgcagacaaggtctacaaattgccgcgt

SEQ ID NO: 77292 - DNA, 110 bp, synthetic construct
  source 1..110: mol_type = other DNA
aaatgcctcgtgacggggcggtgaaagtgcagacaaggtctacaaattgccgcgtctacgtctgactcagccgccgcagagtgagtttggcaactggaatcttgcaaagg

SEQ ID NO: 77293 - DNA, 110 bp, synthetic construct
  source 1..110: mol_type = other DNA
acctgctcagcttcaagctatcatgtgacatcactgtccactgtccggaagtggacactgggaagagatgccacgatggaccctcagagccgcgctagtccctgccctgc

SEQ ID NO: 77294 - DNA, 110 bp, synthetic construct
  source 1..110: mol_type = other DNA
gtctggtactgtgatgggacgcatggcatggcagcacagatttgtcagacccacggaccatataaccctcagggtgaaccctaatgtaaactggggcccgacttaatgat

SEQ ID NO: 77295 - DNA, 110 bp, synthetic construct
  source 1..110: mol_type = other DNA
aatggcaaaggcctagcgggagtgagcgaggccctgccgccctccaggagggtagagaagcctcagagctgctcaaagccgcatggcttcttggaaaagcggatccgacg

SEQ ID NO: 77296 - DNA, 110 bp, synthetic construct
  source 1..110: mol_type = other DNA
cagatgtctggaagcaaaggtgatgtgtagaggggtgggtgctctgtgagagtatgtggcctcatgcttaaaataactgatcgatcacatataaagctgaccgattgcca

SEQ ID NO: 77297 - DNA, 110 bp, synthetic construct
  source 1..110: mol_type = other DNA
gtggcctcatgcttaaaataactgatcgatcacatataaagctgaccgattgccaaagaaaacgatgacacgaaaaaaacgtgtgtgcagaatgtaaggaaacagctctg

SEQ ID NO: 77298 - DNA, 110 bp, synthetic construct
  source 1..110: mol_type = other DNA
gtatgttgaggcgtgagcatttttgacgaaaactccatttttaaacaccggcctggaagcgctctattctgtcacactctctcctcatagtttccaaatcagtttttcag

SEQ ID NO: 77299 - DNA, 110 bp, synthetic construct
  source 1..110: mol_type = other DNA
agcagattctctccaggggactaggacggtggggacaggagagaagaatctgaggaaaggtggggagggcggctgcccggataccagcccccaacaggcaaagcaaactc

SEQ ID NO: 77300 - DNA, 110 bp, synthetic construct
  source 1..110: mol_type = other DNA
aaaggtggggagggcggctgcccggataccagcccccaacaggcaaagcaaactcttgaacttgccttccaggagcttctcaaggaaacaaaaaagaaagagggattctg

SEQ ID NO: 77301 - DNA, 110 bp, synthetic construct
  source 1..110: mol_type = other DNA
ccgtcacccaggacacactctgtctgattccacttatgtgaggtccctagaggagtgagactcacagagacagaaagtggtcaccaggggccgggcggaggggaagttcg

SEQ ID NO: 77302 - DNA, 110 bp, synthetic construct
  source 1..110: mol_type = other DNA
tgagactcacagagacagaaagtggtcaccaggggccgggcggaggggaagttcgtgtttaatgggaacagagcttcggtcggagaagaggagaaagttctgcggacgga

SEQ ID NO: 77303 - DNA, 110 bp, synthetic construct
  source 1..110: mol_type = other DNA
cagcagtaacgcttttaacttgtctccattttcctctgcggcacgttgtacttggaggattggggacatccgggagagtgaagaaaaagtccctaaacatcgagttcgga

SEQ ID NO: 77304 - DNA, 110 bp, synthetic construct
  source 1..110: mol_type = other DNA
taactactcttttaggcacatcgtggatgtaattaggtaaacggcttgtttagtaggagagccgagagggaagaggccagcagagaaacgggacaggacgcccagagagc

SEQ ID NO: 77305 - DNA, 110 bp, synthetic construct
  source 1..110: mol_type = other DNA
ggagagccgagagggaagaggccagcagagaaacgggacaggacgcccagagagcatgagcgttcgagctggaaggcgcccctgcccggcccggtcccaggcggtctgca

SEQ ID NO: 77306 - DNA, 110 bp, synthetic construct
  source 1..110: mol_type = other DNA
ctttcagtctcatcagcagagtcaagttcatctttgggcaataggagcacagcctttgctagttttcaggccctaagaagatttcggagatgggggtggattgatgacca

SEQ ID NO: 77307 - DNA, 110 bp, synthetic construct
  source 1..110: mol_type = other DNA
ttgctagttttcaggccctaagaagatttcggagatgggggtggattgatgaccaaatctgaaaggaagcctgtaataacaaagttaatcaatgtttaattaaatatcta

SEQ ID NO: 77308 - DNA, 110 bp, synthetic construct
  source 1..110: mol_type = other DNA
gcctttgagagcctcccagccccttaacctcttgttccaaggctgcttgaggatctcgcaaggaaggaaggtcaaagcttctttccgctttgaccagggattctgcatct

SEQ ID NO: 77309 - DNA, 110 bp, synthetic construct
  source 1..110: mol_type = other DNA
aagacacatttgcaaagggacccctgtgatcccaagtgatgaagctgtgtgccggcgccgacagcgtttaaaggactgtaaggaaatccagctcacaggtgcaaagaagc

SEQ ID NO: 77310 - DNA, 110 bp, synthetic construct
  source 1..110: mol_type = other DNA
cgaggctggaactcatccttccaaaagccaggatgccccttgggcactctgcgctttcggctcaggatctgctttcccttcattccttttgtccacacagtcctgcatcc

SEQ ID NO: 77311 - DNA, 110 bp, synthetic construct
  source 1..110: mol_type = other DNA
ttcggctcaggatctgctttcccttcattccttttgtccacacagtcctgcatccctgcccttctgagctggcattctccctaacggctccacgccccctccccagtttg

SEQ ID NO: 77312 - DNA, 110 bp, synthetic construct
  source 1..110: mol_type = other DNA
tttggtgctggagcccgatgacatcagaacttggtcaggggtttgcttttgtgcgctaaggaacgctctgggatgggctgctgccagcaaaaacatttgtctgctcttgg

SEQ ID NO: 77313 - DNA, 110 bp, synthetic construct
  source 1..110: mol_type = other DNA
ctacgcacacccctagacacggcccatcccaccagggggccaggacccagttctacccatccgtgggcagtcactgcacccttttgccaggaagcctgtactagcctcta

SEQ ID NO: 77314 - DNA, 110 bp, synthetic construct
  source 1..110: mol_type = other DNA
aggtggcgtctggcagatctctgccggggggaagttcagatccgggaaacaggacgaaggtctatggattattttcctggggaagctcctgacggcaccagcctcgcggg

SEQ ID NO: 77315 - DNA, 110 bp, synthetic construct
  source 1..110: mol_type = other DNA
gaaggtctatggattattttcctggggaagctcctgacggcaccagcctcgcgggggcctgggctgggcagtgggtcagggtggcgggtggcttttcaaaggagggccac

SEQ ID NO: 77316 - DNA, 110 bp, synthetic construct
  source 1..110: mol_type = other DNA
ccggctccattgtagggaacacttaaagctaagacccaaatgacttcttgccagaaacttgtctttcatcagtggctcaaaaacaggaatacagcgtagtgagtaaaact

SEQ ID NO: 77317 - DNA, 110 bp, synthetic construct
  source 1..110: mol_type = other DNA
cagttatttaccaccatctagaaactatgtgctcgcacggccttgtggatgcatttaagccactgacgtgcccacctgaagacggttgcaagggttatacattctaccaa

SEQ ID NO: 77318 - DNA, 110 bp, synthetic construct
  source 1..110: mol_type = other DNA
tgagctcgaggtcatctgtcggcaccaccttcactctggtccaaagtcttcacgacatgaggattttttaaaactaactcaacattctaattgagaccaactctagggtt

SEQ ID NO: 77319 - DNA, 110 bp, synthetic construct
  source 1..110: mol_type = other DNA
tggtcgctaagaccctctgctgggtctggggcctggggtctggttggtggaaacccatcagtctgggtcaagtttctctgtgccctttgtgtgcaggtttcatctgcatc

SEQ ID NO: 77320 - DNA, 110 bp, synthetic construct
  source 1..110: mol_type = other DNA
tgccaataaaactttatttacaaacacatgccgtgggccggatttggcttgggaacacttaagcaggagcaaattcttccagatacactgtcttctggctttacctgctt

SEQ ID NO: 77321 - DNA, 110 bp, synthetic construct
  source 1..110: mol_type = other DNA
attccaggcaggggtgtattgctaacactggagcccccctgacccagtcaccccgatgccccggtgtatctggaggaagatgacttcaggtttatttgagtttacagagc

SEQ ID NO: 77322 - DNA, 110 bp, synthetic construct
  source 1..110: mol_type = other DNA
atgccccggtgtatctggaggaagatgacttcaggtttatttgagtttacagagctggagccccaagctctattatagtttagggctcaggcagtttttatatgcagcac

SEQ ID NO: 77323 - DNA, 110 bp, synthetic construct
  source 1..110: mol_type = other DNA
atgaatgaataaagaagaagtggtacctctgtacaagggaagatgactcggccgtgaagtagaatgaaatgatgccacctgcagcaacctggaggggcccagagatgacc

SEQ ID NO: 77324 - DNA, 110 bp, synthetic construct
  source 1..110: mol_type = other DNA
gactccaagtgcgtgtgagtgccttgtcttacagggtctcaagttggaaccgcatcagagatgatgtttttcataagaagagctcaaagattccatgatgatgtcaacta

SEQ ID NO: 77325 - DNA, 110 bp, synthetic construct
  source 1..110: mol_type = other DNA
acccagccttccctctgtcccagaacatgcaagccagggatgctttttctgctttcctgtaaaaactggatagcggcaaagtcaaccctggatccagtttatgaaaagcc

SEQ ID NO: 77326 - DNA, 110 bp, synthetic construct
  source 1..110: mol_type = other DNA
acttaaaaaactggattcaccaaggactagtaacgtaacacaaacctcacactgagtgtcaggggcctcacgattcaggtcccttcagcccaggtccggggctttttaca

SEQ ID NO: 77327 - DNA, 110 bp, synthetic construct
  source 1..110: mol_type = other DNA
acggcgacgggggcaaggaggtgtaggaagaacagttttactcatctagaaagaatatgccttccttagaatggttcttgccgttggcaaagctgagaccatgctcgcag

SEQ ID NO: 77328 - DNA, 110 bp, synthetic construct
  source 1..110: mol_type = other DNA
tatgccttccttagaatggttcttgccgttggcaaagctgagaccatgctcgcaggcttctccccctgcagtaagtgacaggaaaaacacacgggcgccgtcgccggctg

SEQ ID NO: 77329 - DNA, 110 bp, synthetic construct
  source 1..110: mol_type = other DNA
attatcattgctggcttttgcatccatttctttttgggttcagtttccttcccaaactacacctttcagagggctttcgctgtagatgttgagtggtaaactttctcatt

SEQ ID NO: 77330 - DNA, 110 bp, synthetic construct
  source 1..110: mol_type = other DNA
actacacctttcagagggctttcgctgtagatgttgagtggtaaactttctcattgcgcctcactttgtctgaaaatgttgtcatgctgccattattccagaaaaacagc

SEQ ID NO: 77331 - DNA, 110 bp, synthetic construct
  source 1..110: mol_type = other DNA
tcatgagtgagctccctgatgctggaaaagctgagaaggatgtgggtgagcacctgccggcggcggggggggggttcacagaacatttaacacacatgtggaagagacaa

SEQ ID NO: 77332 - DNA, 110 bp, synthetic construct
  source 1..110: mol_type = other DNA
gccggcggcggggggggggttcacagaacatttaacacacatgtggaagagacaatttatttcctctgagatcccttcagctgaaggatgcaacggtttgtaggcgttta

SEQ ID NO: 77333 - DNA, 110 bp, synthetic construct
  source 1..110: mol_type = other DNA
atggaggcaggggcgcggggaccagcatgcaacatgccccccgagtgactttcggaaacatcacatcaggtcaccgactcccgaaacaaacaccaccaccgaaaacggaa

SEQ ID NO: 77334 - DNA, 110 bp, synthetic construct
  source 1..110: mol_type = other DNA
aaacatcacatcaggtcaccgactcccgaaacaaacaccaccaccgaaaacggaacaatcaaaaaaggcacagaagcctcgggtgctgaccgctaagaggagagcaacac

SEQ ID NO: 77335 - DNA, 110 bp, synthetic construct
  source 1..110: mol_type = other DNA
aggagttccaagagctttccagttattccctcgtcggttcttacaacgtgcccatggagttacgagagggcacagattatgaataattagttcactctcatcctttcctc

SEQ ID NO: 77336 - DNA, 110 bp, synthetic construct
  source 1..110: mol_type = other DNA
atattatgtaagttcttaaccctctgagacacagcggggactctaagcttattgttttttaaccattgctattaaaatgtccatgcctcaaatatatagggaatgctcag

SEQ ID NO: 77337 - DNA, 110 bp, synthetic construct
  source 1..110: mol_type = other DNA
tttttaaccattgctattaaaatgtccatgcctcaaatatatagggaatgctcagtggaagctagaatgagagaaatgagtctagcaccttctccagggactaaaatccc

SEQ ID NO: 77338 - DNA, 110 bp, synthetic construct
  source 1..110: mol_type = other DNA
cctcggaggcagtgggttcaggagaggccagacgagtgtatgtccacattctccgatcaccccgacgcagggcaggccccagcgcccacgacaacagaggaagggggctc

SEQ ID NO: 77339 - DNA, 110 bp, synthetic construct
  source 1..110: mol_type = other DNA
ggagaaaacactaaaatgggtatgacaaaaaaaaaaaaaccaaaaaaaaaacaagcaaagatctctgtaggggtgggctgaataactttctcgaatttggagatactgga

SEQ ID NO: 77340 - DNA, 110 bp, synthetic construct
  source 1..110: mol_type = other DNA
aacctcgtgtcatttgcatctgatttacaaacgctgaggccagctcaggtgccgtccccagggaagccagagcgtgactctttcccagcgttttccccttgcatcccgca

SEQ ID NO: 77341 - DNA, 110 bp, synthetic construct
  source 1..110: mol_type = other DNA
ttaggtgatgtggcctgggtcacgcagctggttaggagccgagctgtagttgagtccagtataccaccatgactcaagaaaagatcaaaccttagttattagaattcatc

SEQ ID NO: 77342 - DNA, 110 bp, synthetic construct
  source 1..110: mol_type = other DNA
tacagatagtgtaggtgagatcaaaacgtgtgaggggagcagctgttctttttaaacgataggctcgctgtgggctcccgggggagacagtgtttgagagaaaggcagaa

SEQ ID NO: 77343 - DNA, 110 bp, synthetic construct
  source 1..110: mol_type = other DNA
acgataggctcgctgtgggctcccgggggagacagtgtttgagagaaaggcagaagcggggaccaggaaacacggttctccactcttttgcacgcgtgggtctgtgccgg

SEQ ID NO: 77344 - DNA, 110 bp, synthetic construct
  source 1..110: mol_type = other DNA
ccattaagaaaggaagggagaaggaagtaggatgggtaggggaggaggagggcattcgcctttgtttaacgcctgcatccttaagtcctctcgacagtccggagatgttc

SEQ ID NO: 77345 - DNA, 110 bp, synthetic construct
  source 1..110: mol_type = other DNA
ggccctagaaagacaaaaagacaaacaaacaaaaacaacctttgtgactgtgcaaatggtcattcttgttttcagtcttagatgatgagcgatgcttacctagaagccca

SEQ ID NO: 77346 - DNA, 110 bp, synthetic construct; identical to SEQ ID NO: 77345
  source 1..110: mol_type = other DNA

SEQ ID NO: 77347 - DNA, 110 bp, synthetic construct
  source 1..110: mol_type = other DNA
cattgggtcttttatgtattcctggcacagagtaggcagacagcatttgtttcgtcacatacatgagcttgttaatgtaattagatttaattaactgaaagaccactgaa

SEQ ID NO: 77348 - DNA, 110 bp, synthetic construct
  source 1..110: mol_type = other DNA
aagctattaggacgactcagctcctcgaatattaaaagcaccctagcacgtttctccaggtcagaagaacagggaccccctggagcttgcagtggtaagaacagctgtgt

SEQ ID NO: 77349 - DNA, 110 bp, synthetic construct
  source 1..110: mol_type = other DNA
ccaggtcagaagaacagggaccccctggagcttgcagtggtaagaacagctgtgtggcggtgcctctcagacaggtgtgtggtaagcgagtaattgctcgtgaagagaga

SEQ ID NO: 77350 - DNA, 110 bp, synthetic construct
  source 1..110: mol_type = other DNA
tgcccagcatggcacaaattcaattttatattaaaaaaaaaaaaaaaaaagcttagggagaaaacattaaatcccagcacccattactcagaaagcaagtgaaggcctct

SEQ ID NO: 77351 - DNA, 110 bp, synthetic construct
  source 1..110: mol_type = other DNA
tttcagggaaaaagtgaatgtgtgaaataaatataaatacaaaattaaatatgcgtggcctctgaaacagccatttcagtttggcttagcctctcttcttaccctgtcag

SEQ ID NO: 77352 - DNA, 110 bp, synthetic construct
  source 1..110: mol_type = other DNA
gcagatatgcaaaatggggtgaaacaggaaagtaaggaaaaaccactgcagacatgtatccaaaagttgacaactgctccaagggtggtccttgctactgctaggatcta

SEQ ID NO: 77353 - DNA, 110 bp, synthetic construct
  source 1..110: mol_type = other DNA
gtatccaaaagttgacaactgctccaagggtggtccttgctactgctaggatctactgaagaggcttagaatgactctcagaactgcctgcttgggagacaagagaagga

SEQ ID NO: 77354 - DNA, 110 bp, synthetic construct
  source 1..110: mol_type = other DNA
tctacgtactgccacatgccagtcctaagttcacatgtggtaggtccaacatagcctggtagttatcctcacctactttcaagtccctgtcaagagggtaaaaagctcaa

SEQ ID NO: 77355 - DNA, 110 bp, synthetic construct
  source 1..110: mol_type = other DNA
tgcatccttacttatcagctctctattagagagttcttcattttatccattccttgacctttgcttaaaggcagtctttatgctatgttcttatgcggttgtgaatacca

SEQ ID NO: 77356 - DNA, 110 bp, synthetic construct
  source 1..110: mol_type = other DNA
ctcagtttaaatcccttattctacgttattctaccatttctctctgtcttactttagtcacgttacaaactggatttcctcaccataaaatagacccagtgcagattctg

SEQ ID NO: 77357 - DNA, 110 bp, synthetic construct
  source 1..110: mol_type = other DNA
agtcacgttacaaactggatttcctcaccataaaatagacccagtgcagattctgctagttgacttcaatgcacattctctccttctagaatccccccatttcagcttga

SEQ ID NO: 77358 - DNA, 110 bp, synthetic construct
  source 1..110: mol_type = other DNA
aactctattcacaaggtgggcgatatagctcagcttcattttactgatgaggaaacggaggtgcggcggttagcagggccaaagtagagactgactgtgtggtttgattt

SEQ ID NO: 77359 - DNA, 110 bp, synthetic construct
  source 1..110: mol_type = other DNA
cggaggtgcggcggttagcagggccaaagtagagactgactgtgtggtttgattttgctgatacaccaagctgtctttctgagcccatagacgcacttcgagtacgtgct

SEQ ID NO: 77360 - DNA, 110 bp, synthetic construct; identical to SEQ ID NO: 77358
  source 1..110: mol_type = other DNA

SEQ ID NO: 77361 - DNA, 110 bp, synthetic construct; identical to SEQ ID NO: 77359
  source 1..110: mol_type = other DNA

SEQ ID NO: 77362 - DNA, 110 bp, synthetic construct
  source 1..110: mol_type = other DNA
ccccagccccgcacagtgggtgaagggtgccacgtaggtcacaactgcagctcaggtcttattccgggaactccatatgccgccggaaggctaaaaaagaaagaaaaaaa

SEQ ID NO: 77363 - DNA, 110 bp, synthetic construct
  source 1..110: mol_type = other DNA
ctatctagtccagtatttttaagataaataggatatatatataaaacgagatacagtggtatatcccgttagtggaccaatttagtaggttttgaccgaaaattgtaata

SEQ ID NO: 77364 - DNA, 110 bp, synthetic construct
  source 1..110: mol_type = other DNA
gggacgaaaagataagttgggaaccaaagataatgtgtggttgttaatgcgctgtggttgccttcagacagagcaggtggccgtgctgctcagtggaaacagtcaaggcg

SEQ ID NO: 77365 - DNA, 110 bp, synthetic construct
  source 1..110: mol_type = other DNA
ggttgccttcagacagagcaggtggccgtgctgctcagtggaaacagtcaaggcgggaagaaggtgacagtccaggatccctttcctcagtgtcagaagaagcaggcctg

SEQ ID NO: 77366 - DNA, 110 bp, synthetic construct
  source 1..110: mol_type = other DNA
atatctttttatagttggtttgcttaaatcacaatccaaacagcatccagctttcatttgtttgctgtggttcctaagtttcttctcatcagtatcagttccctttcctc

SEQ ID NO: 77367 - DNA, 110 bp, synthetic construct
  source 1..110: mol_type = other DNA
tttctgatgtgccacgatgggaactcccagatcaatatttttaaaacaacatttccatcaaatcatttccctgcttgaaaaacagaagaaaataaaacaaaacttcaatg

SEQ ID NO: 77368 - DNA, 110 bp, synthetic construct
  source 1..110: mol_type = other DNA
actcgagttggaaacctgttcacttgttgaggaattccactaatgtacatacactgggctcacacgctcttgagtggcgttacggaaaacaaactgtttcgtataaaagg

SEQ ID NO: 77369 - DNA, 110 bp, synthetic construct
  source 1..110: mol_type = other DNA
gggctcacacgctcttgagtggcgttacggaaaacaaactgtttcgtataaaaggtcatttgaaaacacattcatgactttgttacttaaggaatccaacaggagatctc

SEQ ID NO: 77370 - DNA, 110 bp, synthetic construct
  source 1..110: mol_type = other DNA
catcacatacagaaactgaacatctaatgttcacggaggttaggtgacttgcccaagatcactaagcttggaaatactgaacagaggagttaaatttgtttccggatgcc

SEQ ID NO: 77371 - DNA, 110 bp, synthetic construct
  source 1..110: mol_type = other DNA
ataaaaacacttgattgagttcataaatcagacatttttttttcaatactactattttagagcagtttaaggttcacaacaaaactaagaggaaggtacagaggtttccc

SEQ ID NO: 77372 - DNA, 110 bp, synthetic construct; identical to SEQ ID NO: 77371
  source 1..110: mol_type = other DNA

SEQ ID NO: 77373 - DNA, 110 bp, synthetic construct
  source 1..110: mol_type = other DNA
ccacgtgctaggcactgtcccaggttctgaatatattaaaagtatgcgaccctgtttcaaataatagtgagcaataataagagccccaatgactccacgtcaactaaaag

SEQ ID NO: 77374 - DNA, 110 bp, synthetic construct
  source 1..110: mol_type = other DNA
ttcaaataatagtgagcaataataagagccccaatgactccacgtcaactaaaagctcctgatgtgcacgctgaatgagctgctgttccgaggtttatccttcactgaag

SEQ ID NO: 77375 - DNA, 110 bp, synthetic construct
  source 1..110: mol_type = other DNA
atactgtccgtgtgattcgtggagggcatctcactatggcttagttcctgctccaggatccattgactaataacatcattgccccttctgatgatctgacttaaggcaac

SEQ ID NO: 77376 - DNA, 110 bp, synthetic construct
  source 1..110: mol_type = other DNA
ggatccattgactaataacatcattgccccttctgatgatctgacttaaggcaacacttttctgcaactgactctcttactcattccacctgggacaactaattcctctt

SEQ ID NO: 77377 - DNA, 110 bp, synthetic construct
  source 1..110: mol_type = other DNA
tcctgaaaccaggcatgaggatgagcatcatttgacagtatatgtttgtcagttgacacctgactttgagaccaaatctagcatttgctctcttttgatcacttccacct

SEQ ID NO: 77378 - DNA, 110 bp, synthetic construct
  source 1..110: mol_type = other DNA
acacctgactttgagaccaaatctagcatttgctctcttttgatcacttccacctgtccttccacatggtcaattccaagactggctgacccagggctagaggaacttag

SEQ ID NO: 77379 - DNA, 110 bp, synthetic construct
  source 1..110: mol_type = other DNA
ttccatgggcattgttgcaatcagccccattgtgaggaaagatatggttgctcgctgttcttgtctgtgcaaaatttgagctgcagtctcatttctgatgggaaagagcg

SEQ ID NO: 77380 - DNA, 110 bp, synthetic construct
  source 1..110: mol_type = other DNA
aaaaaaatggagactctaaaaacaggtttagccgagacacctgccatggtaaatttccttcatgaaactgagccaagtaagtttatcttcacgtacgtccatctctctta

SEQ ID NO: 77381 - DNA, 110 bp, synthetic construct
  source 1..110: mol_type = other DNA
agctaaaattaaactttaacaacagaagctgttgacaaggatgtggagcatctggaatgctcatctgccgctggtgggagtaaaaaatggtaaacagctttgaaaacctg

SEQ ID NO: 77382 - DNA, 110 bp, synthetic construct
  source 1..110: mol_type = other DNA
aatgctcatctgccgctggtgggagtaaaaaatggtaaacagctttgaaaacctgtgtgacttccagcaattcctctggtatgcatttacctaagagaaatgacaacgac

SEQ ID NO: 77383 - DNA, 110 bp, synthetic construct
  source 1..110: mol_type = other DNA
ttgcttgtttagttgattcggaaattcgtctgtttttcaaagtttattcgtatgtatgcatctatagttcagatcatagcctttggggtgtcttaaaaacacttctgttt

SEQ ID NO: 77384 - DNA, 110 bp, synthetic construct
  source 1..110: mol_type = other DNA
gtagaggcaaaaatgcctattcctttagctcatctatcccacgtctttcttgacttggcagcacgccaccacccaccacaaagcattctatacatttctgctcacatttg

SEQ ID NO: 77385 - DNA, 110 bp, synthetic construct
  source 1..110: mol_type = other DNA
tggcagcacgccaccacccaccacaaagcattctatacatttctgctcacatttgttcttagttgccagtattattcgtgggaaaatagctacgctctctttttattgca

SEQ ID NO: 77386 - DNA, 110 bp, synthetic construct
  source 1..110: mol_type = other DNA
tgtttgctagccccaaatattcatttctggggtttgctagtgaatacaaacagtaagaacattttggacttgaataggtgcttagagtttgaagacatggctgaaaggag

SEQ ID NO: 77387 - DNA, 110 bp, synthetic construct
  source 1..110: mol_type = other DNA
agaacattttggacttgaataggtgcttagagtttgaagacatggctgaaaggagggcccaggatgagccatttaggagctgttgtgccaaggtctgtgccaagcaggca

SEQ ID NO: 77388 - DNA, 110 bp, synthetic construct
  source 1..110: mol_type = other DNA
gctctgggattcagtctggcagcctctcccctgtaaggtttaaccatcactaacatttctagaagacgggggagctaacaacaccggcccaatccaccccacacaggctg

SEQ ID NO: 77389 - DNA, 110 bp, synthetic construct
  source 1..110: mol_type = other DNA
tttctagaagacgggggagctaacaacaccggcccaatccaccccacacaggctgctctatttatagagtcctctggcaatgcatggtccctagaggtccaaccctcaag

SEQ ID NO: 77390 - DNA, 110 bp, synthetic construct
  source 1..110: mol_type = other DNA
tgttttcttaggctggtggagctactgtctctattagcttataacagaggtcaacactttaaacagcaacgaatcatatcaaatgaacttccttgacagctggcagtgaa

SEQ ID NO: 77391 - DNA, 110 bp, synthetic construct
  source 1..110: mol_type = other DNA
cccacacccacacacccccaccccccccacacacacacgtcttcccattttatgaaacagatttaaaagagaaccacattagtctcccgccagttggtaattatccattt

SEQ ID NO: 77392 - DNA, 110 bp, synthetic construct; identical to SEQ ID NO: 77391
  source 1..110: mol_type = other DNA

SEQ ID NO: 77393 - DNA, 110 bp, synthetic construct
  source 1..110: mol_type = other DNA
tttcctacccattttgatgagggtttttctaatttacccaatgggtaggcattgctcagctagtttctggatttctttactgggagtttttccacaagtagctatagatt

SEQ ID NO: 77394 - DNA, 110 bp, synthetic construct
  source 1..110: mol_type = other DNA
aggagacggcagaactcacagctctggaccatgtagatgtgggggtgagatgacggagtgggaggaatccaagataacttccaaatttctaccttgagcaacagttaaga

SEQ ID NO: 77395 - DNA, 110 bp, synthetic construct
  source 1..110: mol_type = other DNA
gcatcgaagcctggaaggcagagagagatgaaagctggaaccccccaacctgttcgcactcactcacatcctgtcccaccgaaatgactaattaccctcagagagtaaac

SEQ ID NO: 77396 - DNA, 110 bp, synthetic construct
  source 1..110: mol_type = other DNA
agacaggtattcttagactcgttttatatttggggatattgattttcagagagtttaaataacttgtcaagctcacttgctactaagtggttgaactgaagatggaggac

SEQ ID NO: 77397 - DNA, 110 bp, synthetic construct
  source 1..110: mol_type = other DNA
taaataacttgtcaagctcacttgctactaagtggttgaactgaagatggaggacaggtccactcgcttcagagctacttttgtttgtttgtttctaccagaccatagca

SEQ ID NO: 77398 - DNA, 110 bp, synthetic construct
  source 1..110: mol_type = other DNA
caggaggaaaaacaggaagaatgtacatacgatgtagcttactaatacataaccgcggattcatttagttagaactgcttggccacatttcaggagaaaggtagcaagaa

SEQ ID NO: 77399 - DNA, 110 bp, synthetic construct
  source 1..110: mol_type = other DNA
tcctgttgggggtgcagtaactcctttccctgaagtttgccaggaacataggatgtgagcattagtagtcgatggtatctgggtgtgggccacgggaaggcagtgaggtg

SEQ ID NO: 77400 - DNA, 110 bp, synthetic construct
  source 1..110: mol_type = other DNA
ctgctctttggaagctaggatcacaggcgtgaggtgtgctcatagctattggagtggaaatggggtgtgtgtgtacactagcaaaggcatggatgtgcacatggacacgc

SEQ ID NO: 77401 - DNA, 110 bp, synthetic construct
  source 1..110: mol_type = other DNA
ggaaatggggtgtgtgtgtacactagcaaaggcatggatgtgcacatggacacgcgtgctcatttagtgtgtatagctgtgtctctgggtctcttaaaatccagtacctt

SEQ ID NO: 77402 - DNA, 110 bp, synthetic construct
  source 1..110: mol_type = other DNA
aaccaaaccaaaccatccatttctccctctgccaggtgggctgtgaatgcacaccttcctcactacccagtttcacccctactgtggagacgtccagctctgctcttggt

SEQ ID NO: 77403 - DNA, 110 bp, synthetic construct
  source 1..110: mol_type = other DNA
ttcctcactacccagtttcacccctactgtggagacgtccagctctgctcttggtactatatattttcggagacctggtgcctattctagttcctactctgtaccacgtc

SEQ ID NO: 77404 - DNA, 110 bp, synthetic construct
  source 1..110: mol_type = other DNA
gaacgccggtctccttgtggtttgatgagagcttgatgattgaagtttccagctcgctgaccactctttcttcacctccctcgctcctgcctcctctgttagcacaaatc

SEQ ID NO: 77405 - DNA, 110 bp, synthetic construct
  source 1..110: mol_type = other DNA
gctgaccactctttcttcacctccctcgctcctgcctcctctgttagcacaaatcctgtccttggtttatgtcattccttgctcagtgctttctctcggcggccttgtct

SEQ ID NO: 77406 - DNA, 110 bp, synthetic construct
  source 1..110: mol_type = other DNA
gttttttggtgtgaacgctcactttcaattctctcgggcagaacggctgggtcgtggtgactttaggtttgaccttttgaggagctgccaaactgttctccacagtggct

SEQ ID NO: 77407 - DNA, 110 bp, synthetic construct
  source 1..110: mol_type = other DNA
taatacacacgcatgaaaaatcttttaagcggtttcttgtatttgcttccttacgcaactgcagtgaattattggctattagcgtctatttaataatccagatgaataat

SEQ ID NO: 77408 - DNA, 110 bp, synthetic construct
  source 1..110: mol_type = other DNA
caactgcagtgaattattggctattagcgtctatttaataatccagatgaataatcaggttgattcatactgtgccttatctgtaacaaatttgaaaattccagtggacc

SEQ ID NO: 77409 - DNA, 110 bp, synthetic construct
  source 1..110: mol_type = other DNA
gagaacacaatgtgtcatgcaaactctatctagacatcagaagttggcaatctttttccgattctggcctcacatcattccttcatgcccctaattcttccctgtgtgtt

SEQ ID NO: 77410 - DNA, 110 bp, synthetic construct
  source 1..110: mol_type = other DNA
gaagagatggatttggggagcgttaccactaacgagaaagcaggagagggtgtcgactgtagaagatgggaagagaaggcaaagggaggtgctaaaatggggataaaaga

SEQ ID NO: 77411 - DNA, 110 bp, synthetic construct
  source 1..110: mol_type = other DNA
ctcttaatataggaagggacacagggacgtatttctttctatcatatctctcctgattttactcactagccaatctccggagtataaaattagttgctgctgttgttctt

SEQ ID NO: 77412 - DNA, 110 bp, synthetic construct
  source 1..110: mol_type = other DNA
catattaactggcaaacctactgtttacagaaatttggtgacaaatttcgcttcatgtggaaaaccgatgtggtttcccttgcttactacccatacgtggagttgatcct

SEQ ID NO: 77413 - DNA, 110 bp, synthetic construct
  source 1..110: mol_type = other DNA
tgtggaaaaccgatgtggtttcccttgcttactacccatacgtggagttgatcctaagcttttgtgatcaatgatcacatatccgaggttaatgtagaagagagcaatat

SEQ ID NO: 77414 - DNA, 110 bp, synthetic construct
  source 1..110: mol_type = other DNA
aatagtctgaaactagctttgctcattgacactgaaattactcaattaccacaactgttgaaacttctaaaagaggaattttttttttttttttttttttggctgcaccc

SEQ ID NO: 77415 - DNA, 110 bp, synthetic construct; identical to SEQ ID NO: 77414
  source 1..110: mol_type = other DNA

SEQ ID NO: 77416 - DNA, 110 bp, synthetic construct
  source 1..110: mol_type = other DNA
ttattcattcttccaacaacatttactgagcacctgctgtgggccaggcagtgccccagaaaaccccagacatccagatcagttggtgtgtaattaatatcagattaaca

SEQ ID NO: 77417 - DNA, 110 bp, synthetic construct
  source 1..110: mol_type = other DNA
tactactaatttccaattttgaagatggttggatgacatcttcccattattggctgggaaagtcttcttgtgcataccatgtatttaaaagggttttgctgagcttgttc

SEQ ID NO: 77418 - DNA, 110 bp, synthetic construct
  source 1..110: mol_type = other DNA
gggaaagtcttcttgtgcataccatgtatttaaaagggttttgctgagcttgttccctcttcttcctttcattagggcaatgtccaaagtttctcctgttagatatggtg

SEQ ID NO: 77419 - DNA, 110 bp, synthetic construct
  source 1..110: mol_type = other DNA
gggttctgtaaagaaataagaagaactgggtctcattgaattagcttttgttaaacgtccagttataaactgactattgtggcaggaaatttgtacatgtttattgccag

SEQ ID NO: 77420 - DNA, 110 bp, synthetic construct
  source 1..110: mol_type = other DNA
ttggtgccctgtccatatccctcagcactcagcattctgatagctcattactatgagcacctgccactttctgcctgaggacttttccatccccagcagtgtgcttggcc

SEQ ID NO: 77421 - DNA, 110 bp, synthetic construct
  source 1..110: mol_type = other DNA
atatatatttttattaaagtaatgtcagtgtggctaaaattcaaatagtacagacaagcttttcatccaaagcgacatagtcctggagttcccatcatggcttagcagta

SEQ ID NO: 77422 - DNA, 110 bp, synthetic construct; identical to SEQ ID NO: 77421
  source 1..110: mol_type = other DNA

SEQ ID NO: 77423 - DNA, 110 bp, synthetic construct
  source 1..110: mol_type = other DNA
ccattcttccagtgcatactcctctgtgcagctgcctgtgggtaggacagatagcaaccttgctccaggcatattgtgttccactgagaaccaactttcttaaaaattaa

SEQ ID NO: 77424 - DNA, 110 bp, synthetic construct
  source 1..110: mol_type = other DNA
aacttccatgtgccacaattacgtccctagggggtgaaagaaagagagagaaaaaagtagcatttgaggagctaatgcactgataccataaagaggcagtctggaggaca

SEQ ID NO: 77425 - DNA, 110 bp, synthetic construct
  source 1..110: mol_type = other DNA
agaaataaatttctgttgtttataagccccttggtttatgctatttttgttataccaacccaactgggccaagccattcctttatacctttctcttcaggcaaaccatag

SEQ ID NO: 77426 - DNA, 110 bp, synthetic construct
  source 1..110: mol_type = other DNA
atacctttagaatgagtagagtgcctacagaaataccatgtctctaattttttcaacaggttcgcataaataatttctttggggaccagcccatgttttttttttatata

SEQ ID NO: 77427 - DNA, 110 bp, synthetic construct
  source 1..110: mol_type = other DNA
ttagtccaagcacaataggttggatgtctcccactgaaccaaagggacaagaatgtgacctagtgctggtagcaaaagaatgacccctccttggaggtgtgtggatatgg

SEQ ID NO: 77428 - DNA, 110 bp, synthetic construct
  source 1..110: mol_type = other DNA
tgacctagtgctggtagcaaaagaatgacccctccttggaggtgtgtggatatggggcatggggcaagtggaggagaaaaaaaataatacacatacatgtactatcttac

SEQ ID NO: 77429 - DNA, 110 bp, synthetic construct
  source 1..110: mol_type = other DNA
ttccatcccctcactttcagtctatatgtgtccctagatctaaagtgggtcttttacaggcagcatatatttgggtcttgtttttatatcctttcagccagtcttttggt

SEQ ID NO: 77430 - DNA, 110 bp, synthetic construct; identical to SEQ ID NO: 77429
  source 1..110: mol_type = other DNA

SEQ ID NO: 77431 - DNA, 110 bp, synthetic construct
  source 1..110: mol_type = other DNA
ctttactccatggacctgtcatcttttggtgcagcccatgctaagtggcttctgcagaactgaactcttcatcatccccatgtcagcgacatgaactagacgaattcagt

SEQ ID NO: 77432 - DNA, 110 bp, synthetic construct
  source 1..110: mol_type = other DNA
aaactcttgtggagatgaaggccactaagctaagggttatagaaaaacagagcactggaagctgctgcaaagaaacagaaatccatagatccaggtcccagatctagacc

SEQ ID NO: 77433 - DNA, 110 bp, synthetic construct
  source 1..110: mol_type = other DNA
aggcttaattagattgcagtttatttaagaccatggagcagcaagtggcagaaccacatcatctaaccagttctttttccagtaaaccacaggatccctggcttctagcc

SEQ ID NO: 77434 - DNA, 110 bp, synthetic construct
  source 1..110: mol_type = other DNA
ctaagtacagattacagcttacttttaaattgagcatgaaaaagtcactttggaaggactctgatgatactcaatcctgaaagtaattttttgttctgtcttgtgaatct

SEQ ID NO: 77435 - DNA, 110 bp, synthetic construct
  source 1..110: mol_type = other DNA
tccttgaaggatactactgctagctacaatccactgcatatagacactaagagctaaaattggcagaggtcctgttgtagcacagcagaagttaaaccgactagtatcca

SEQ ID NO: 77436 - DNA, 110 bp, synthetic construct
  source 1..110: mol_type = other DNA
tcattttatttacccatgcttcttttttcccatttcatgaaattaattgtacataatgggggaggttgagaacgctgaattatttgaagcctggagggagcagagcagct

SEQ ID NO: 77437 - DNA, 110 bp, synthetic construct
  source 1..110: mol_type = other DNA
atgggggaggttgagaacgctgaattatttgaagcctggagggagcagagcagctgtgtcctacatcagaccactgatctatctaataggttgtcttgccacctgattca

SEQ ID NO: 77438 - DNA, 110 bp, synthetic construct
  source 1..110: mol_type = other DNA
ttactttggacttcctcatctcccttccagttgttcaaagacaaatccatcctttcaggcccagcctaacaatggtcttagattcttccctaccctctgttcagttcatt

SEQ ID NO: 77439 - DNA, 110 bp, synthetic construct
  source 1..110: mol_type = other DNA
caggcccagcctaacaatggtcttagattcttccctaccctctgttcagttcattgatactcttcagctctgaactcctcaagcccttgattagtacagggttagcataa

SEQ ID NO: 77440 - DNA, 110 bp, synthetic construct
  source 1..110: mol_type = other DNA
aggtgagtttgcaagaatataataaactcatgttacctcagtgaagattggagatatgtgttgatggctcttttggaaattgcttctttcaggatgagctaatttttttt

SEQ ID NO: 77441 - DNA, 110 bp, synthetic construct
  source 1..110: mol_type = other DNA
ctataaacagcatattacagttttttttcctgataattttttttttccctagacagatggaggatttaaacaccaggtaagcctccatgtctgtcttttccaattaggtt

SEQ ID NO: 77442 - DNA, 110 bp, synthetic construct
  source 1..110: mol_type = other DNA
gatggaggatttaaacaccaggtaagcctccatgtctgtcttttccaattaggttgctgtctgaaacctgtcctagatctatctttatctccaagttgcaggtataacta

SEQ ID NO: 77443 - DNA, 110 bp, synthetic construct
  source 1..110: mol_type = other DNA
taagaatcaaagttttcaacaaacaaaggacttcaaaactgaaagtgataagaagctcatctctggagggtaacggtaaggtttaccagcctcaaacaggagattcaaag

SEQ ID NO: 77444 - DNA, 110 bp, synthetic construct
  source 1..110: mol_type = other DNA
tgataaccatttttcataaaaattttagaaaaaagttttctgtgctggggaggaagttcatagaacacctgtaaggccccttataattctatagagttcacattgcctgg

SEQ ID NO: 77445 - DNA, 110 bp, synthetic construct
  source 1..110: mol_type = other DNA
gttcatagaacacctgtaaggccccttataattctatagagttcacattgcctggaatggccaggggacaaagggaaggggtagtgttcaaagtctactgccaggcttaa

SEQ ID NO: 77446 - DNA, 110 bp, synthetic construct
  source 1..110: mol_type = other DNA
gcattagataattgtcccaatgtgcagcaaaagagacttgttacaacatgctggtttgattacatgcaaataatctttgtaaccttcattatcatgtattgaacatccat

SEQ ID NO: 77447 - DNA, 110 bp, synthetic construct
  source 1..110: mol_type = other DNA
acatgctggtttgattacatgcaaataatctttgtaaccttcattatcatgtattgaacatccattgtgtactagacaacttacctctgttatatcacttgatttaatac

SEQ ID NO: 77448 - DNA, 110 bp, synthetic construct
  source 1..110: mol_type = other DNA
gagtcaaacaatttggtaatctttaaaactataaaataaatcccaaaccaaaaagaaatcaccacaccaatttcagcttgcaatacaaagctccaacttacaagatagtg

SEQ ID NO: 77449 - DNA, 110 bp, synthetic construct
  source 1..110: mol_type = other DNA
agacatgcggaaatgaggtctcatgaactagggctgcttctacaccagagattttttttttcctttctgtggccgcccctggaagttctcaggctaggggttgaactgga

SEQ ID NO: 77450 - DNA, 110 bp, synthetic construct
  source 1..110: mol_type = other DNA
gggaaaggcagaacatggcttcgctctggcctaggacggttgggtgtctgtacgcaggctgaagagttaaatctgccaatgcaaaatcccaaagaagaggagcactggag

SEQ ID NO: 77451 - DNA, 110 bp, synthetic construct
  source 1..110: mol_type = other DNA
ggttttgatagatgcaaagaaagaaaaggctccctggaagctagaatgggaccagaggtgaggaatgccaaggaaacagggcaggtggcactctgaaaggaaagaggagc

SEQ ID NO: 77452 - DNA, 110 bp, synthetic construct
  source 1..110: mol_type = other DNA
tttctttttctatgtgtttgtttctttgtttgtttgtttttgaagtgtaagtgacctgcagcattatgttccggttacacaccctagcaattcaatatttctagacattt

SEQ ID NO: 77453 - DNA, 110 bp, synthetic construct
  source 1..110: mol_type = other DNA
ctgcagcattatgttccggttacacaccctagcaattcaatatttctagacatttcaaaatgatcgccttgataaatctagttatgaaagagcatcatacaaagacatta

SEQ ID NO: 77454 - DNA, 110 bp, synthetic construct
  source 1..110: mol_type = other DNA
tttgtttactcggtggcattcactagcttccttttcttgatcctttgacaggacacatttgggatgagctgggtccagagtcgcatccacaacaatgaaagtcgtgcgaa

SEQ ID NO: 77455 - DNA, 110 bp, synthetic construct
  source 1..110: mol_type = other DNA
catttgggatgagctgggtccagagtcgcatccacaacaatgaaagtcgtgcgaatctgcacagagtctgcattgggtcaggattcggggtctcattctttctcttccgt

SEQ ID NO: 77456 - DNA, 110 bp, synthetic construct
  source 1..110: mol_type = other DNA
actaacagggaatgcccacaatccaatcagagtgattccgtcctgtataaatataggagcaaaatttccggacaaatctctttatttagctgagaagtcatggctcgtac

SEQ ID NO: 77457 - DNA, 110 bp, synthetic construct
  source 1..110: mol_type = other DNA
ttctcatatatacacacaacttggaatatagacttaaactaatagatatgggcatgtgtttaagcactctcttctggagcttggtgtttttctgtacttagtggacttgt

SEQ ID NO: 77458 - DNA, 110 bp, synthetic construct
  source 1..110: mol_type = other DNA
tgttaaatgcctaaaggtcagagtaagagttaaccagctatgtgactttaaaacaacaactattctgcacttgcagccccttcctcacttgaagtaatcctaaagaacat

SEQ ID NO: 77459 - DNA, 110 bp, synthetic construct
  source 1..110: mol_type = other DNA
aaattggtaatcaaactaggatatacaattaaggtgttcattgtaatccccaaggtaatcaccaagaaaataaccaaaaaaccagagcattgtgccacagtgggttaagg

SEQ ID NO: 77460 - DNA, 110 bp, synthetic construct; identical to SEQ ID NO: 77459
  source 1..110: mol_type = other DNA

SEQ ID NO: 77461 - DNA, 110 bp, synthetic construct
  source 1..110: mol_type = other DNA
atcccttctctgtcgggaagctccctcattaactatcagcccgcattcctctcaagtgagatttcgaatagtcctttgggccagggaaagggcaaaccagtttactgtca

SEQ ID NO: 77462 - DNA, 110 bp, synthetic construct
  source 1..110: mol_type = other DNA
ggtaaaagaaatttatgacctaaaatgtacttatacagaggattaaattatgctcaaaatatcactaagagtgctgcgcatacacattttagcagaattactcctttact

SEQ ID NO: 77463 - DNA, 110 bp, synthetic construct
  source 1..110: mol_type = other DNA
cagaggattaaattatgctcaaaatatcactaagagtgctgcgcatacacattttagcagaattactcctttacttctctattatatttgtgaatgctatcttggtcttt

SEQ ID NO: 77464 - DNA, 110 bp, synthetic construct
  source 1..110: mol_type = other DNA
tgccttggttgcagacccggaactgcaattctctcctcttcccaaataaacccgtctttgctggagaaaatatctggcagcttatttgtctcagatcaacaattcatatt

SEQ ID NO: 77465 - DNA, 110 bp, synthetic construct
  source 1..110: mol_type = other DNA
ctgggattgctccctccgccacctcaccatgcttgcttttctacctccagtaccactgaaagagaatttaatttcctggattgaggaggaaagcttgttaccgtaaagct

SEQ ID NO: 77466 - DNA, 110 bp, synthetic construct
  source 1..110: mol_type = other DNA
ctgaaagagaatttaatttcctggattgaggaggaaagcttgttaccgtaaagctcgacctctggtctcatctgttcagcaaagtagtggtggggtgtggttattaagtg

SEQ ID NO: 77467 - DNA, 110 bp, synthetic construct
  source 1..110: mol_type = other DNA
tgcacttaccagaactgacctctgtcaaaattaagctcttattcccctagctgctgagaggcttgatgaccaaaagttcgtagctctcccttcaaagattgccctctact

SEQ ID NO: 77468 - DNA, 110 bp, synthetic construct
  source 1..110: mol_type = other DNA
atgtcttctaatctccaggaccatggtttttgcaaggtttgcctcttgaagttaacaaggttgcttccactgtctttctgatatttcactgccatgtgtctggctggggg

SEQ ID NO: 77469 - DNA, 110 bp, synthetic construct
  source 1..110: mol_type = other DNA
atgccctgggcgaggccaaaaacagaaacaaaacaaagaacacagtcacacctgtttgtttacatctatagctactttgcataattgtgacagagactgtgaccaaatag

SEQ ID NO: 77470 - DNA, 110 bp, synthetic construct
  source 1..110: mol_type = other DNA
ttgcagttggaggaagcagcagaagtcaggagatgtaaggaaaggaaagcccctttgcgccggcctggttcatctccggctcgtcagactcagctttcccagactattcc

SEQ ID NO: 77471 - DNA, 110 bp, synthetic construct
  source 1..110: mol_type = other DNA
tgcgccggcctggttcatctccggctcgtcagactcagctttcccagactattcctgttcgtgctgccctgtcaccaggcatcaagccggttggaagtttttacaccctc

SEQ ID NO: 77472 - DNA, 110 bp, synthetic construct; identical to SEQ ID NO: 77470
  source 1..110: mol_type = other DNA

SEQ ID NO: 77473 - DNA, 110 bp, synthetic construct; identical to SEQ ID NO: 77471
  source 1..110: mol_type = other DNA

SEQ ID NO: 77474 - DNA, 110 bp, synthetic construct
  source 1..110: mol_type = other DNA
ttccctccccagtgtctaatgtgggctccgagtcttcagtgcttccttccccttactacctcctttcttacaaattcaataaataaggtgagatgtattcatgggatctc

SEQ ID NO: 77475 - DNA, 110 bp, synthetic construct
  source 1..110: mol_type = other DNA
cagaggcaaaggaaagctcctgggagatcaaggcagctggctccagaggggcacgggctactcagacactcgtccacctcagtctgacagcgtgggccttcaaagcctat

SEQ ID NO: 77476 - DNA, 110 bp, synthetic construct
  source 1..110: mol_type = other DNA
ctagttgggttctttacggctgagcctcgccgggatctccacatcctctctttttcaacccaacttatttttttaacattcattgcagttaaatatacagtgtttagcac

SEQ ID NO: 77477 - DNA, 110 bp, synthetic construct; identical to SEQ ID NO: 77476
  source 1..110: mol_type = other DNA

SEQ ID NO: 77478 - DNA, 110 bp, synthetic construct
  source 1..110: mol_type = other DNA
ataggttcttcttctaagtcacttaaattggtgcagataggatttaagcttgacataaggagagatttgcccaaaaaagttacagtgggtgaaggagtagatgtgggcac

SEQ ID NO: 77479 - DNA, 110 bp, synthetic construct
  source 1..110: mol_type = other DNA
ggcagggcacttagaataaagaaagtgtgtgttccatgcagctaaacagtgggatcaagaaagagtcattggattcctgctgttgcacaatgggatcacggggtctctgt

SEQ ID NO: 77480 - DNA, 110 bp, synthetic construct
  source 1..110: mol_type = other DNA
caagaaagagtcattggattcctgctgttgcacaatgggatcacggggtctctgtggtgctgggacacaggttcatcccctggccccacacaattgcagcagctggggct

SEQ ID NO: 77481 - DNA, 110 bp, synthetic construct
  source 1..110: mol_type = other DNA
ccaggcgttcttggcacccctcttctgactgcccccacccttcctgggatctgtctttggtcctcgtttcttcatagctggaggcttagattagctgaaaatcaattcgt

SEQ ID NO: 77482 - DNA, 110 bp, synthetic construct
  source 1..110: mol_type = other DNA
ctcatatggctcagtcaagagaatggacagatggagatggagtcctgttcatagcgtctccactaccaccagctggagcttagacagatcagaggttttaattatggacc

SEQ ID NO: 77483 - DNA, 110 bp, synthetic construct
  source 1..110: mol_type = other DNA
gatggagtcctgttcatagcgtctccactaccaccagctggagcttagacagatcagaggttttaattatggaccatggagttcccactgtggctcagtgggttaagaat

SEQ ID NO: 77484 - DNA, 110 bp, synthetic construct
  source 1..110: mol_type = other DNA
tcagggtcagtgggtgcccaagtggcctctatcttatgtccagcagtggtacaatgtagccatgatttgaacatgttattccactcttcagcttccatggtagttcatga

SEQ ID NO: 77485 - DNA, 110 bp, synthetic construct
  source 1..110: mol_type = other DNA
gtagccatgatttgaacatgttattccactcttcagcttccatggtagttcatgatcctacctctccccacttcatgtagtgccgtcccttgctttgcactgtttgaggt

SEQ ID NO: 77486 - DNA, 110 bp, synthetic construct
  source 1..110: mol_type = other DNA
gacagttggaaactagtgacttgtttgtgaaacccaatgaaccatcatccctcctctgtgcttacacgggccaagctctctgcctagcacattatgtgcaccagttcaat

SEQ ID NO: 77487 - DNA, 110 bp, synthetic construct
  source 1..110: mol_type = other DNA
atgaggacacaaagaaaagatggccatctgtgaagtaggaagtgggctctcaccgaacctcagatctgctagtgccttgatcctggatgtctcaagctctgaattgtaag

SEQ ID NO: 77488 - DNA, 110 bp, synthetic construct
  source 1..110: mol_type = other DNA
aacctcagatctgctagtgccttgatcctggatgtctcaagctctgaattgtaagttccagaactgaaagcaataaatgtctgatgtttataaaccactcagcctatgat

SEQ ID NO: 77489 - DNA, 110 bp, synthetic construct
  source 1..110: mol_type = other DNA
tggaccttatcacaactcaaatctgcatcaccaaggcaatctttactcaaacatgcctgtctctatggcccccttctttctaagtcattctgccaacagctctatcagac

SEQ ID NO: 77490 - DNA, 110 bp, synthetic construct
  source 1..110: mol_type = other DNA
tcttcacaacaaccaaaacttctacagtattgccctcggaaaatggctcttttaaatcgagtcccttccaaaatggtgtgattcctagtgaaatcagctcttgggtccac

SEQ ID NO: 77491 - DNA, 110 bp, synthetic construct
  source 1..110: mol_type = other DNA
gaatgcaaggaagtttaagacgggaggtagagtatttgccagagactgtaaggtgatttttatcttttgtctttttaaggccacaccgaggcatatggaggttcccaggg

SEQ ID NO: 77492 - DNA, 110 bp, synthetic construct
  source 1..110: mol_type = other DNA
aggcctcgaaggagagaggagctccaacccatgcccctggaatcaccctgctccgtcccatggctttcctttctggtcacagtcacaggctgggctataaacatagatgt

SEQ ID NO: 77493 - DNA, 110 bp, synthetic construct
  source 1..110: mol_type = other DNA
cctggaccacgaggtctaagcccacgtaggctaggatgcaaggaagtggacaattactgtgggctgaaggagtcggtatctccttcccttccttttacccactcatttcc

SEQ ID NO: 77494 - DNA, 110 bp, synthetic construct
  source 1..110: mol_type = other DNA
ctctgcttggggctcaggaaccccggggctccgcccgccgccacagccactctaccccctgagtccccttctcagggctgagggttccagcctcctggaatgagcgtttc

SEQ ID NO: 77495 - DNA, 110 bp, synthetic construct
  source 1..110: mol_type = other DNA
gcattatctgaaagaatgtgtgaactgtgcccaagaataacatcaactaccctggggtggaaggcactgtaatttaaaaatcctgacataccatgcaacttgcacaggtg

SEQ ID NO: 77496 - DNA, 110 bp, synthetic construct
  source 1..110: mol_type = other DNA
ggtggaaggcactgtaatttaaaaatcctgacataccatgcaacttgcacaggtgaattcagacttgagagtatctggctctagaagtggcaaggtccctgtttctgccg

SEQ ID NO: 77497 - DNA, 110 bp, synthetic construct
  source 1..110: mol_type = other DNA
caagagtgaaagttctgaaccctgagtcaggtccccatgcctgaggatctggcattgtgagaaatagcccccatagcatctaccatggaaggcaggtggggcttgtgcac

SEQ ID NO: 77498 - DNA, 110 bp, synthetic construct
  source 1..110: mol_type = other DNA
gatctggcattgtgagaaatagcccccatagcatctaccatggaaggcaggtggggcttgtgcacaggagcgccacaggacggggggaaatggagaccccatttttgaaa

SEQ ID NO: 77499 - DNA, 110 bp, synthetic construct
  source 1..110: mol_type = other DNA
tatcacaggagggatatctaaacacttctgccatattctgttgattagaagccaatcgcagtttctaaccatactccaggaataggaattatacaaagctgtggccacca

SEQ ID NO: 77500 - DNA, 110 bp, synthetic construct
  source 1..110: mol_type = other DNA
attttttcaaatgaggccaatttctatttacaacctgcaagtggggaagaggccacaacatatgtttaggtagtattagtctatacataaaacttatggactagggtagg

SEQ ID NO: 77501 - DNA, 110 bp, synthetic construct
  source 1..110: mol_type = other DNA
caacatatgtttaggtagtattagtctatacataaaacttatggactagggtaggtgcaatatggtattattcagccatatacactatgggtatgaaagaagacagctta

SEQ ID NO: 77502 - DNA, 110 bp, synthetic construct
  source 1..110: mol_type = other DNA
ccacacagttcttaagattcaaaagtatcggaatccagcccggaacaaaaaccttccttgaaggtctttaagtttcaaggcagcaaaatttataaaactgaacatttcaa

SEQ ID NO: 77503 - DNA, 110 bp, synthetic construct
  source 1..110: mol_type = other DNA
ccttgaaggtctttaagtttcaaggcagcaaaatttataaaactgaacatttcaacaggaaaaactttggtcactaaaatacttccaacaagagaattctttgaggctgt

SEQ ID NO: 77504 - DNA, 110 bp, synthetic construct
  source 1..110: mol_type = other DNA
gtcgccaaattcccaaggctaacaccagcggggtgtccgctcagcaccacctcccagggcctgacatccacagtttcctctctagcatctcctgtcactggatgtgacca

SEQ ID NO: 77505 - DNA, 110 bp, synthetic construct
  source 1..110: mol_type = other DNA
agggcctgacatccacagtttcctctctagcatctcctgtcactggatgtgaccattcacttctgtccgtttttgaggagccctggctttcgctctaaaatttatcatta

SEQ ID NO: 77506 - DNA, 110 bp, synthetic construct
  source 1..110: mol_type = other DNA
acacccagatgggaaaattctaggcctcgctgggagtttagctgaccttcttttgcataaaattgtggttttcatccccttaggagtaggaaggatgttgggctggggaa

SEQ ID NO: 77507 - DNA, 110 bp, synthetic construct
  source 1..110: mol_type = other DNA
tatttaggaggagaaaggagagatcttaaccagaggggagagatgagagaaaacccagactctgcttactttcctttcaggggcatactagctactgttaaggtaggatg

SEQ ID NO: 77508 - DNA, 110 bp, synthetic construct
  source 1..110: mol_type = other DNA
aggcagccactctgaattattactgtgattggtcccaacagctctcgggtgggcggatggccttgcttggggttgggggagggaactccagcaacctggcctcctgccgc

SEQ ID NO: 77509 - DNA, 110 bp, synthetic construct
  source 1..110: mol_type = other DNA
ttccgagcaaatgaacagagaggcttcaatgccactaccttgtgagagagccatcagtgcgagggccagagccccgagcagcccaaggacatgatgtaccgtctccagcc

SEQ ID NO: 77510 - DNA, 110 bp, synthetic construct
  source 1..110: mol_type = other DNA
ctggggccttgacgatggcatttgagtgctccacccagggttccaggcctccccgaggctgcagggtatcagttgtcacagcccagcttgtgtgaacaaggcagccctcg

SEQ ID NO: 77511 - DNA, 110 bp, synthetic construct
  source 1..110: mol_type = other DNA
tacactgattttttaaaacgaagatccaaactaagtccatacatttcatttggttgatacgactcaaccttagtctgaaacagtttcccctcctggccctttgttttcaa

SEQ ID NO: 77512 - DNA, 110 bp, synthetic construct
  source 1..110: mol_type = other DNA
gatacgactcaaccttagtctgaaacagtttcccctcctggccctttgttttcaagccatttatttgttgaagaaaacaggtcatttatcttgtagtatttcctacattc

SEQ ID NO: 77513 - DNA, 110 bp, synthetic construct
  source 1..110: mol_type = other DNA
agatgacatctgaaacaaaaagacaacttaagtcaatgccaggtacaccctcaaggctcaaagcagccaccaaagagaatcccgaacaccacctgaaccacagaaagaca

SEQ ID NO: 77514 - DNA, 110 bp, synthetic construct
  source 1..110: mol_type = other DNA
gctcaaagcagccaccaaagagaatcccgaacaccacctgaaccacagaaagacatgttcctcaataggctagttcagaagcttactgacaaagtaattcagtacatttg

SEQ ID NO: 77515 - DNA, 110 bp, synthetic construct
  source 1..110: mol_type = other DNA
ctttccgtcattctgttcattgtcacacacaggtctctgctttttggtttaggaaatgaagtacaggtgtgacaaagagacctaactgcttttagctctttgtttggaag

SEQ ID NO: 77516 - DNA, 110 bp, synthetic construct
  source 1..110: mol_type = other DNA
atgaagtacaggtgtgacaaagagacctaactgcttttagctctttgtttggaaggtgctataggaacccaggcttggtggaggatggggataccaggaagggcctcgaa

SEQ ID NO: 77517 - DNA, 110 bp, synthetic construct
  source 1..110: mol_type = other DNA
aagtactatacaatctcctcccgtggcccgcccgccctccgtcctctcgccgcttctctgtcttggtgtctctgttcctcagttctcctctgtagggtatttgtcacatc

SEQ ID NO: 77518 - DNA, 110 bp, synthetic construct
  source 1..110: mol_type = other DNA
catatacaaaaaagtaactgaaaatgggccaaaaacctcagtgtaagagctaaaactatcaaactcttagaagaaaacagagagataaatcttcactgaccttgaattag

SEQ ID NO: 77519 - DNA, 110 bp, synthetic construct
  source 1..110: mol_type = other DNA
gctctgccgcatagcttctctgatcgttccagcccatgctcctcattctcatctcttagcttttctggcaggaatctcagtcctggcacaatttggtacttaattataga

SEQ ID NO: 77520 - DNA, 110 bp, synthetic construct
  source 1..110: mol_type = other DNA
taggaaccttagatcaatgatcagtactagccagtaaaagtatgtgaactatacatgtaacattaatttttctagtagctacatcaaaaaagtgaaaaggaataggtgag

SEQ ID NO: 77521 - DNA, 110 bp, synthetic construct
  source 1..110: mol_type = other DNA
ttaatggcatcaatatttacacctagcgcgttttcacagaattacactatccacctggtacctaagtcttgtcatggacttataggtttgcatgggttccaaatactgat

SEQ ID NO: 77522 - DNA, 110 bp, synthetic construct
  source 1..110: mol_type = other DNA
tggtacctaagtcttgtcatggacttataggtttgcatgggttccaaatactgatttatggtactgtttttggaactattgtgggactacattttggtgtggtgtttggg

SEQ ID NO: 77523 - DNA, 110 bp, synthetic construct
  source 1..110: mol_type = other DNA
ctgaggtcagaggggtccggtgatggtgcaagtcccgttggcacttctgtggactctctccggggccaggacaagggtctcctaactgtgactcctcacagctttgcctt

SEQ ID NO: 77524 - DNA, 110 bp, synthetic construct
  source 1..110: mol_type = other DNA
ctctccggggccaggacaagggtctcctaactgtgactcctcacagctttgcctttccctctgactgcctgcctctcccccgtggccctgcttccttttgaaattggcca

SEQ ID NO: 77525 - DNA, 110 bp, synthetic construct
  source 1..110: mol_type = other DNA
gatgaagggttaactgcaaaaggtctctgtgtcttgatatagttatacagagtatttgtatataaagctggctttaaaagtcctgatagcctggttcccatctcagacca

SEQ ID NO: 77526 - DNA, 110 bp, synthetic construct
  source 1..110: mol_type = other DNA
tttttgtttttgtttttgtttttgtttttgaccatgccagtggcatgtagttcttgggccagggatccaacagctgtgactccagccactgtggtgacaatgttgcagaa

SEQ ID NO: 77527 - DNA, 110 bp, synthetic construct
  source 1..110: mol_type = other DNA
tgcctgagataccagacaattggaggtggctccctttgcatttgccttgacttgccagctgtattaatttcctcgggctgctataacaaaataccaccaactgggtggct

SEQ ID NO: 77528 - DNA, 110 bp, synthetic construct
  source 1..110: mol_type = other DNA
cttgacttgccagctgtattaatttcctcgggctgctataacaaaataccaccaactgggtggcttaagacaacagaaatttattttccacacttctggaggttagaagt

SEQ ID NO: 77529 - DNA, 110 bp, synthetic construct
  source 1..110: mol_type = other DNA
gggcccacagtgctgcttccctccccttctcagaaagggatgggaggcagcgcctctctctctccgagagctcagttggggccctcagaggacactcacatgttccttct

SEQ ID NO: 77530 - DNA, 110 bp, synthetic construct
  source 1..110: mol_type = other DNA
cgttctatcattctttgtgtcaaggtgcagctaatgcaaagcaggtggaagcactgcagatatgcacgtgcaaggctggcacaagcctaattctgaggacttgctgtgcc

SEQ ID NO: 77531 - DNA, 110 bp, synthetic construct
  source 1..110: mol_type = other DNA
catatctcatgtgaaaagaaccgagagcccggggcagactctccaaagctggctaaacagcaccctcctgccccccacatcacccccaccccagaggtcacccgcccctg

SEQ ID NO: 77532 - DNA, 110 bp, synthetic construct
  source 1..110: mol_type = other DNA
cccagagaaggacccagacccagaagggctcctgaccaggcccgccaggcctgcagcctcccctcgccagcacgaagggcacctagaggaagggatttttagaaggtggc

SEQ ID NO: 77533 - DNA, 110 bp, synthetic construct
  source 1..110: mol_type = other DNA
gaggaaaacttgttgaaactattttcagcttttgataagcaaaaatttaggttattatagatagtcctgtagaaagttataaatgcagacctagtctggaaatcatctat

SEQ ID NO: 77534 - DNA, 110 bp, synthetic construct
  source 1..110: mol_type = other DNA
actgccaggcttgggagtagacctagcctcgggctactccagcactgagggcagatatgggctcccatctcactcgcagcatcgggtggacccgggttgaaccctctcat

SEQ ID NO: 77535 - DNA, 110 bp, synthetic construct
  source 1..110: mol_type = other DNA
tatgggctcccatctcactcgcagcatcgggtggacccgggttgaaccctctcataaccaggcccacccagccggcgctcgggatacagtgttcaaggtgctcgccccca

SEQ ID NO: 77536 - DNA, 110 bp, synthetic construct
  source 1..110: mol_type = other DNA
ttcttcactaactcttagaaaaccaaaagagtcaccgaaaataagtaataaatatcatccttggtcagcgccacagactgttccacctggtgtgatgacggataatgaat

SEQ ID NO: 77537 - DNA, 110 bp, synthetic construct
  source 1..110: mol_type = other DNA
cctttctaacctcctgtctcacctgttcccttctttcattcctctgtctggcctgggcctgttccagagggtcctttagtaacgtgagagatgagtttgggtctccggat

SEQ ID NO: 77538 - DNA, 110 bp, synthetic construct
  source 1..110: mol_type = other DNA
ggcctgttccagagggtcctttagtaacgtgagagatgagtttgggtctccggatctaaggacatgaagtcactgcatgaggctggtagcaggaaccttcttgaggaaga

SEQ ID NO: 77539 - DNA, 110 bp, synthetic construct
  source 1..110: mol_type = other DNA
taaccaggagcctctttatgtctgaagcctttgagagaaggaagggagctctgcaaagcatcagatcagcacaaatccagagacatttagactttcctgggagttcccgt

SEQ ID NO: 77540 - DNA, 110 bp, synthetic construct
  source 1..110: mol_type = other DNA
ttcaattctactgcgccacaacgggaaccccagtgtgctttgagtttctacacgaaggtgagcagagagcttgggaagcagaggggacagacattgtaggcctacagtga

SEQ ID NO: 77541 - DNA, 110 bp, synthetic construct
  source 1..110: mol_type = other DNA
gaactgattccagaaaacagattcttaggatgagttctctgaattggttctggttagttgtgatgggtcttctcatttgactgggtttaaaggtattaatgagcacattt

SEQ ID NO: 77542 - DNA, 110 bp, synthetic construct
  source 1..110: mol_type = other DNA
agttgtgatgggtcttctcatttgactgggtttaaaggtattaatgagcacatttcccgggtaaagaggtcataaacagtggtaaacagctagttatattctcacctgga

SEQ ID NO: 77543 - DNA, 110 bp, synthetic construct
  source 1..110: mol_type = other DNA
gggggttgaaaaagcagcttaccctttttttatacaaaacatagctatacctaaagtacatagacagatatagtgtattaaaatttcatggggggtgcaattatgaaaat

SEQ ID NO: 77544 - DNA, 110 bp, synthetic construct
  source 1..110: mol_type = other DNA
ctgatgccagctggacattggccaccaaagcagcagcacagccactgctttcttgtaaagctgctgcagcagccagagagaacacttcagggtcccccggagtctgggac

SEQ ID NO: 77545 - DNA, 110 bp, synthetic construct
  source 1..110: mol_type = other DNA
gggatgtttggatggagcaggagagcggacgacctcgggtgtcttggattgagctctcctgaaactgactgtgagactgcgatgtcaggacaggtaacgtattggggagc

SEQ ID NO: 77546 - DNA, 110 bp, synthetic construct
  source 1..110: mol_type = other DNA
aatgaatgtaagtttccattcagtggcgtgagagaggaagaggtacagaatacacatggcctatataactaatgtgataccattgtagaggcatgctcattggacattag

SEQ ID NO: 77547 - DNA, 110 bp, synthetic construct
  source 1..110: mol_type = other DNA
aggaagatgaatattgcctccatactgttgtgagtattaagataaacactgcaaaagtccaagccttgtaaattatcaaattatctgaatacacattgtttcctgcgtat

SEQ ID NO: 77548 - DNA, 110 bp, synthetic construct
  source 1..110: mol_type = other DNA
ggttttaactgatcagtctgcatctgacagtgaaccagctattatcttaacggaatcaaacgaacattcaaagccgtgctcagccccaaacatgaaaggagatgtcatct

SEQ ID NO: 77549 - DNA, 110 bp, synthetic construct
  source 1..110: mol_type = other DNA
tcctgactccccagaagcccagagcccacaaaacaccagtgtcaacgtgcctcgtccccggaggtccggggccttaaaacttaatagtctctcacatgctgtaacgctag

SEQ ID NO: 77550 - DNA, 110 bp, synthetic construct
  source 1..110: mol_type = other DNA
aggctacgggttttttttttctttcttcttttcctttttggaatgctggccattggcaaacaaaaacatggggtgtttctttaaaatcaaaagaatggctgttgaagaaa

SEQ ID NO: 77551 - DNA, 110 bp, synthetic construct
  source 1..110: mol_type = other DNA
cgatacagagctcagtctgctgcagagagagtcaccttgggagaaataagtggtacggagcctgaatggattaagatggagtgtctactagaacatgcgaggagcatatg

SEQ ID NO: 77552 - DNA, 110 bp, synthetic construct
  source 1..110: mol_type = other DNA
cggagcctgaatggattaagatggagtgtctactagaacatgcgaggagcatatgtgagaattcaaacaggacttaaagagttccctctgtggcccagtgggttaaagga

SEQ ID NO: 77553 - DNA, 110 bp, synthetic construct
  source 1..110: mol_type = other DNA
aaaaggtaaaggtttctatttgtctctgagaagtcaagttccctgttagctaccccctttcccgaatttgcattttaagaaggtggcagagaagaccagatagaacattt

SEQ ID NO: 77554 - DNA, 110 bp, synthetic construct
  source 1..110: mol_type = other DNA
ctgatccaggagagaggtgacgtgcaaatagtgcttcaccagggagaagagcagccttcctgggacctgtaggacacaacctttggcctaagtccaccttgtctcagctt

SEQ ID NO: 77555 - DNA, 110 bp, synthetic construct
  source 1..110: mol_type = other DNA
tcgcccttgctcgcgccgtctaccaggtaagtgaaagatggggggggtccagagcttggcttgggagcgtggaagagtgggcaaaggaggggaatgttcatcagctttgg

SEQ ID NO: 77556 - DNA, 110 bp, synthetic construct
  source 1..110: mol_type = other DNA
ttggcttgggagcgtggaagagtgggcaaaggaggggaatgttcatcagctttggtttttccccagccccctccaagctcctaaggtgttggtcccttggccatcctatc

SEQ ID NO: 77557 - DNA, 110 bp, synthetic construct
  source 1..110: mol_type = other DNA
cccctcaggaggctccacagaagcctggggcccggtttggaaagggtacctccaaccccgagggtctctgcctctggggaggagagggagagtgcttctggtctctctga

SEQ ID NO: 77558 - DNA, 110 bp, synthetic construct
  source 1..110: mol_type = other DNA
ccccgagggtctctgcctctggggaggagagggagagtgcttctggtctctctgagctggtgacatcaagtgctatctgcccgaaggagaaggcttttctggggaaattg

SEQ ID NO: 77559 - DNA, 110 bp, synthetic construct; identical to SEQ ID NO: 77557
  source 1..110: mol_type = other DNA

SEQ ID NO: 77560 - DNA, 110 bp, synthetic construct; identical to SEQ ID NO: 77558
  source 1..110: mol_type = other DNA

SEQ ID NO: 77561 - DNA, 110 bp, synthetic construct
  source 1..110: mol_type = other DNA
gctgggctcagagggccactgggaggatgaattcagggggagccagctgagggccaggcacccaggacaagctccttaaatattctttagtgggccactgctatttttct

SEQ ID NO: 77562 - DNA, 110 bp, synthetic construct
  source 1..110: mol_type = other DNA
acccctgcctgagcagagtggcagaggctctgagccttgctctgagccttggggggggatgtgtctgtgtgtctatctgcctgtaccggggtggccaggggccaggactc

SEQ ID NO: 77563 - DNA, 110 bp, synthetic construct
  source 1..110: mol_type = other DNA
gggatgtgtctgtgtgtctatctgcctgtaccggggtggccaggggccaggactcgttgttctaaagtccgatctgatatttccatccggcttctggcctcttccccctt

SEQ ID NO: 77564 - DNA, 110 bp, synthetic construct
  source 1..110: mol_type = other DNA
acttttagaagtggggtgacatccaaaaagtttactcatatcagggccaatgcccttaagttacaggggtcccccacctttatttatgaacttattccaaactgtgagca

SEQ ID NO: 77565 - DNA, 110 bp, synthetic construct
  source 1..110: mol_type = other DNA
gaagctggctcctactgtctgcagacggttaattttcaaggtttgccttcctcttctgtcttgagctctgactttttactttgaaggacacacagcagaggctggcttcc

SEQ ID NO: 77566 - DNA, 110 bp, synthetic construct
  source 1..110: mol_type = other DNA
gctcagtgcctgacaaatagtaagtgctcaatatattgttgctattattaaatttgctcgctgctttggtatcctgttccaggaaagctggcctgagatgattttcttag

SEQ ID NO: 77567 - DNA, 110 bp, synthetic construct
  source 1..110: mol_type = other DNA
gctcgctgctttggtatcctgttccaggaaagctggcctgagatgattttcttagtcaatacctcaaggcacagtgaagtcacagaagatgaaatcaattctattaggcg

SEQ ID NO: 77568 - DNA, 110 bp, synthetic construct; identical to SEQ ID NO: 77566
  source 1..110: mol_type = other DNA

SEQ ID NO: 77569 - DNA, 110 bp, synthetic construct; identical to SEQ ID NO: 77567
  source 1..110: mol_type = other DNA

SEQ ID NO: 77570 - DNA, 110 bp, synthetic construct
  source 1..110: mol_type = other DNA
ggtgcttcaaggacaaaggcgtagtcgtgcactttgaaagggtagattttactatatgtcaattacatctaactaaagctaggatttttaaaacgcataaaggagcaatc

SEQ ID NO: 77571 - DNA, 110 bp, synthetic construct
  source 1..110: mol_type = other DNA
gactggctggagggctgcgagaggagagggcacccagctgcatggccggtgaccggcaacctaaggaagcctaaggaaacctcaccatgggcacaacggcagatggtttt

SEQ ID NO: 77572 - DNA, 110 bp, synthetic construct
  source 1..110: mol_type = other DNA
tgaatgtttcacacaatattagagaaaggaagtcagaggtctgataaccaccattccctcctataattaacacgtgcaaagatggtataaaatatcaagaaaggagtttt

SEQ ID NO: 77573 - DNA, 110 bp, synthetic construct; identical to SEQ ID NO: 77572
  source 1..110: mol_type = other DNA

SEQ ID NO: 77574 - DNA, 110 bp, synthetic construct
  source 1..110: mol_type = other DNA
tgtttgctttgccacacatcccgttccagctcgaatttgtcgctcgcgctcaaaaatctcagtatgtgcaagatgccgtgtatctgattaaagttcaggtgaataagtcc

SEQ ID NO: 77575 - DNA, 110 bp, synthetic construct
  source 1..110: mol_type = other DNA
tatgagctggtgttctgtagaaagtaaatatggtgagttattacgtcatgtataatttttggtggtgcatcaatccctgtgacctgggagtcatttttagttacattaaa

SEQ ID NO: 77576 - DNA, 110 bp, synthetic construct
  source 1..110: mol_type = other DNA
cccttgaggctccggggcaccagatttattttccccgcccgacacatcaaagttgagaaggcaagctctccgggttccaacccgcctgtggggtcatgcacgtgtttgtc

SEQ ID NO: 77577 - DNA, 110 bp, synthetic construct
  source 1..110: mol_type = other DNA
actggaaaaaaacctcaggcagaatggcctttgaaattttaaagtggattttatgaagtcgcggctgcagtgttttttactttgagaatatactgcgaaacgttcatcaa

SEQ ID NO: 77578 - DNA, 110 bp, synthetic construct
  source 1..110: mol_type = other DNA
ggaactactcaatgatatgtcccttaagacgacgtagataaatttgaattttttcccagctaagatggaaacaatctttcaaaatcatgtatccagggagctggatacag

SEQ ID NO: 77579 - DNA, 110 bp, synthetic construct
  source 1..110: mol_type = other DNA
ctatctaaagtcattgcattctgtcttcccccttgatccgggatatcttcattcagatgagctgattccatcacagtgaaagaaggaaacgcagagtaaaaaatgcagat

SEQ ID NO: 77580 - DNA, 110 bp, synthetic construct
  source 1..110: mol_type = other DNA
tctggttcattattctgaaaaattctggggtttagaatcaagagaggtactgggatgacatccttaaggtgcaattagcaattaagtatgagctttatcattaatacagg

SEQ ID NO: 77581 - DNA, 110 bp, synthetic construct
  source 1..110: mol_type = other DNA
tacattttctaactctttggtaaactctgtgttcatcctttcttctccagagtgttacaagcatctttatgatcattactgaaagctctttactgggcaggttgtttatt

SEQ ID NO: 77582 - DNA, 110 bp, synthetic construct
  source 1..110: mol_type = other DNA
tacaagcatctttatgatcattactgaaagctctttactgggcaggttgtttatttctactttgtttagttcttctggggtttttattttgtcccttcactttgaaaata

SEQ ID NO: 77583 - DNA, 110 bp, synthetic construct
  source 1..110: mol_type = other DNA
tgtttgtggtcacgtgatcatgagttcatatttcttctgtgtcatctccttctagaatgagtctttccctgaagctaagctgcctgagtgttgctgatgctgatctgctc

SEQ ID NO: 77584 - DNA, 110 bp, synthetic construct
  source 1..110: mol_type = other DNA
aatgagtctttccctgaagctaagctgcctgagtgttgctgatgctgatctgctcaaccagacttggtcccggggaggcaacgagcagtgtcgccggtacattgccaagc

SEQ ID NO: 77585 - DNA, 110 bp, synthetic construct
  source 1..110: mol_type = other DNA
actggaaagatctttagcctctccaatttcctaatctatgtattaggatggtacagcttgactcatagattgctgtgatgcttcacaggaaaatgcatatcaaatcttta

SEQ ID NO: 77586 - DNA, 110 bp, synthetic construct
  source 1..110: mol_type = other DNA
tttggagtcatataaccttggtttaaaacatagttttatgaatgaaaggctttttgaccctgatcacttatttcaactctccaggccttagttttcaacagctgtagact

SEQ ID NO: 77587 - DNA, 110 bp, synthetic construct
  source 1..110: mol_type = other DNA
gaccctgatcacttatttcaactctccaggccttagttttcaacagctgtagactgggttgtccagaaaacagagatcagagctgatacagtaaggctttactaggtggt

SEQ ID NO: 77588 - DNA, 110 bp, synthetic construct; identical to SEQ ID NO: 77586
  source 1..110: mol_type = other DNA

SEQ ID NO: 77589 - DNA, 110 bp, synthetic construct; identical to SEQ ID NO: 77587
  source 1..110: mol_type = other DNA

SEQ ID NO: 77590 - DNA, 110 bp, synthetic construct
  source 1..110: mol_type = other DNA
ataatcaatctgtgctgttttaagctgctgaatttgtgctaatttgttaaggccgcaatagaaaactgttttacttttaccttattacctgtcatatctcatcaagatga

SEQ ID NO: 77591 - DNA, 110 bp, synthetic construct
  source 1..110: mol_type = other DNA
agtaccatgtaggaagtttctcagggagtgctcttggagccctcatgtagaagggaaatgaagagagcacagaagaagctaagcagcattgcattgcaaatgcagcattg

SEQ ID NO: 77592 - DNA, 110 bp, synthetic construct
  source 1..110: mol_type = other DNA
aaatgaagagagcacagaagaagctaagcagcattgcattgcaaatgcagcattgccccatggtaggataaggggctggatttttacaccctactttgaccagttattgg

SEQ ID NO: 77593 - DNA, 110 bp, synthetic construct
  source 1..110: mol_type = other DNA
atggtctagccattgttatggactgctatgtggaaattatgcttttgttttattattttttaggtggagtattagggccatgtagaaaatttcattgttgcctgttaaaa

SEQ ID NO: 77594 - DNA, 110 bp, synthetic construct
  source 1..110: mol_type = other DNA
cagtggaggctacagttcacacacaatgggtttctcatgtgggaattatcccattggccaagcttaccttctgccatcacggggccctcttttttagtctccacgtgtgt

SEQ ID NO: 77595 - DNA, 110 bp, synthetic construct
  source 1..110: mol_type = other DNA
aatgaagaaattcaattacatctattcaagagtaggggatgctgctggccattacattccaccccagcccccgttttcagttactctagtactgagaagttggaaaacca

SEQ ID NO: 77596 - DNA, 110 bp, synthetic construct
  source 1..110: mol_type = other DNA
gtggactgcgtgcaaggtgcaggtcacagctgctcacacgtcagaatcctcacaccaacctgattattatccccactttacagatggtaaaactgacacacagaagggtt

SEQ ID NO: 77597 - DNA, 110 bp, synthetic construct
  source 1..110: mol_type = other DNA
ctgtttgtctgccaagcagatctctgtaaaccgtaatgtctgctgccagtggccttctttgctcctagctggctcagtacactttagctttgctggtctgggttgggtga

SEQ ID NO: 77598 - DNA, 110 bp, synthetic construct
  source 1..110: mol_type = other DNA
agctctgagacctagaatccctgtccttcagtcccttctagcagctgggagacgtatcatataaatactcaaagatcttggagtttctgttagtggctcagtggtaacga

SEQ ID NO: 77599 - DNA, 110 bp, synthetic construct
  source 1..110: mol_type = other DNA
gctcacgcaggtgacacatcatttcaggatttgcatgtcaagctcacggggacgaggctgcccccacgacactgggctcttacaggctcaggggtggtcggggcctcgtg

SEQ ID NO: 77600 - DNA, 110 bp, synthetic construct
  source 1..110: mol_type = other DNA
ctacccacactttgccacaaaagagcccctccataccccaaaactgaattaaaccaagccccagaaaatgctgatagcgaggttctatgctatactccaggagactttct

SEQ ID NO: 77601 - DNA, 110 bp, synthetic construct
  source 1..110: mol_type = other DNA
aagccccagaaaatgctgatagcgaggttctatgctatactccaggagactttctccctctctcctcctcccctgacacacacacacacacacacacacctacctatata

SEQ ID NO: 77602 - DNA, 110 bp, synthetic construct
  source 1..110: mol_type = other DNA
caaagaggtggcacacatgacactcaggaggtccttgcagatgtcctaaagcaagaatcaataactgtgcaggtggtcagagaggaggcccccaagtcattggagaaact

SEQ ID NO: 77603 - DNA, 110 bp, synthetic construct
  source 1..110: mol_type = other DNA
ttatctggtcccattgctgtctcccttgattctttgctgatgaggctgggcacggggtaagcccagaggctcctctgactgggctgaagagggtcgttcgccgtaggagg

SEQ ID NO: 77604 - DNA, 110 bp, synthetic construct
  source 1..110: mol_type = other DNA
atgatcttctgagcagcccagccttaacggctaatactagtgcctttactccactagcatggagttctagctacaaaagggactttctacttgctctggcagctgtatat

SEQ ID NO: 77605 - DNA, 110 bp, synthetic construct
  source 1..110: mol_type = other DNA
catgggaggacctcacagagtgacagatgtgggaaccaagatccttgtggtggacatgtgcggtttccgggccagcccctctccattcactccgtttccagtaacaacct

SEQ ID NO: 77606 - DNA, 110 bp, synthetic construct
  source 1..110: mol_type = other DNA
atgtgcggtttccgggccagcccctctccattcactccgtttccagtaacaacctcccctcccatgttttgtggggagccacccctcccaacctccatcccctgtggttt

SEQ ID NO: 77607 - DNA, 110 bp, synthetic construct
  source 1..110: mol_type = other DNA
gttcctacaagtgcctggctcacagattggatggtgggtcagaggaggaaaggatgaagaatctaataaacaggacagtttggataatagcgtttgctaacctgcctgag

SEQ ID NO: 77608 - DNA, 110 bp, synthetic construct
  source 1..110: mol_type = other DNA
gctcatcacctcacccatcaaaccttgagtactttcctctctcaaaggcagacacttttgctaaccatgatcacactgttttatcacactacaattttataatttatata

SEQ ID NO: 77609 - DNA, 110 bp, synthetic construct
  source 1..110: mol_type = other DNA
gcaagcctggcttcttgccctcatcctggtctcagctctgggaacctaggtctcccggcttctcagggcctcaatttcctcacctgtgcaaactcaagtgatcatacgtc

SEQ ID NO: 77610 - DNA, 110 bp, synthetic construct
  source 1..110: mol_type = other DNA
aaggtattagccaatgagcattccagtctgtacaccctctgacagagcatcagattactcaagtaagaagaaagtaagattccactggctcattgcgcaagtagttactg

SEQ ID NO: 77611 - DNA, 110 bp, synthetic construct
  source 1..110: mol_type = other DNA
tactcaagtaagaagaaagtaagattccactggctcattgcgcaagtagttactgagtgttcttttatgacaggggcactattttaaacccttgggtgtacagtggtggg

SEQ ID NO: 77612 - DNA, 110 bp, synthetic construct
  source 1..110: mol_type = other DNA
tccctggtcaaataataacccattactttcttcaagaagcctgtctcaaacagttccccccaccaaagcccggggaaggacgcaaacacaggatacaaaccagctttggg

SEQ ID NO: 77613 - DNA, 110 bp, synthetic construct
  source 1..110: mol_type = other DNA
gggtggggttggggcacgtcagacatgccccaggcagaagctgagaaattctaggcatagaaccaggaggggtacaggcactaagtgggggataagggatgtgtctgagg

SEQ ID NO: 77614 - DNA, 110 bp, synthetic construct
  source 1..110: mol_type = other DNA
gggggattctggctgattgaggtatggagtagggtgtagcatgggaaggctcaaggcagaggccagagtgaccaggacaaagcaggcagggggctagtgagaggagatgc

SEQ ID NO: 77615 - DNA, 110 bp, synthetic construct
  source 1..110: mol_type = other DNA
gcgagacccaggctggtgtcccctacccctcccattctctaggcttcaggctggtaggtggaaacatggtaacaacgagcacacatactcactgcatcctcacagctgcc

SEQ ID NO: 77616 - DNA, 110 bp, synthetic construct
  source 1..110: mol_type = other DNA
ctaagaatgttggagggtgaagtaaccttgtcctctttcgcaatgactgtggagggcactggggcggagcagggagataatgccggtcaggctgtggttacctccgtagg

SEQ ID NO: 77617 - DNA, 110 bp, synthetic construct
  source 1..110: mol_type = other DNA
taatgtaatatttgaaacattgcatttatggaaagctatttcatccatctttcttataatgccttcaaattttgtccagaaagtttagcctggaggacaattcactgaag

SEQ ID NO: 77618 - DNA, 110 bp, synthetic construct
  source 1..110: mol_type = other DNA
caactccagagcctctctttgaaccactgcattctagttcctctctttatgttatggtaaaaagaggggatgtttattgtagaaacttgagaaagtagaagtggattttt

SEQ ID NO: 77619 - DNA, 110 bp, synthetic construct
  source 1..110: mol_type = other DNA
acacatagcaggtcatcaataaccaggagcacgcaggaggaggaccttctttgcttctctgcccctgttctcctttaaaaaggtaattactattcaatccctaagtgtaa

SEQ ID NO: 77620 - DNA, 110 bp, synthetic construct
  source 1..110: mol_type = other DNA
tctctgcccctgttctcctttaaaaaggtaattactattcaatccctaagtgtaaatactgcctaagtagcccttgtgaaatcagtatgatgtatttcttgggttcttct

SEQ ID NO: 77621 - DNA, 110 bp, synthetic construct
  source 1..110: mol_type = other DNA
caaggatgtttaaagagccaatgacctcagaagctagagataataaagcttaggcatgtctccctcctcagacacattctaggtaagtaaaatcctcttcctctccctgg

SEQ ID NO: 77622 - DNA, 110 bp, synthetic construct
  source 1..110: mol_type = other DNA
taataaaattcattgagttaaaaaaaaactgaatcttctagtgctttgatctgggactttcagcctcaagaaatgtaggaaataggagttcctgttgtggctcagtgata

SEQ ID NO: 77623 - DNA, 110 bp, synthetic construct; identical to SEQ ID NO: 77622
  source 1..110: mol_type = other DNA

SEQ ID NO: 77624 - DNA, 110 bp, synthetic construct
  source 1..110: mol_type = other DNA
ccaagatcatgaaactccaggacctgattcagttctgcaggaaattgcagcagactgcaggtttgctgagaagtcatgctatgctcagtgggcacggctatagttttgaa

SEQ ID NO: 77625 - DNA, 110 bp, synthetic construct
  source 1..110: mol_type = other DNA
tccaggacctgattcagttctgcaggaaattgcagcagactgcaggtttgctgagaagtcatgctatgctcagtgggcacggctatagttttgaaaccttaacaataagg

SEQ ID NO: 77626 - DNA, 110 bp, synthetic construct
  source 1..110: mol_type = other DNA
ccctagctgcagagccactaacgctgttgacttgtggtctcagctcctggaacaccaggtgctgattagcttcatggagagtggagctccctggctggcgggcaaggagg

SEQ ID NO: 77627 - DNA, 110 bp, synthetic construct
  source 1..110: mol_type = other DNA
gagaggacccacagaaccaacctgtaggttcgtgaaacaaaaggacctaagattaagttatgcgattttatagctaaacaattttcaaaaggaagaaaaaattcctagtg

SEQ ID NO: 77628 - DNA, 110 bp, synthetic construct
  source 1..110: mol_type = other DNA
agctccgtccaccattgtgaactcttttctgctaaaactcaccggaggacattcggaggtctacaaacctaggacactcaccaacacaggctctgagtctcgtgacaggc

SEQ ID NO: 77629 - DNA, 110 bp, synthetic construct
  source 1..110: mol_type = other DNA
tcctccccaggcccactgtgccccgaagcttacataccagctcctcaactgagggtccatcctgatcaggggctaagtggcaaatccacatcccagtggccccacttggc

SEQ ID NO: 77630 - DNA, 110 bp, synthetic construct
  source 1..110: mol_type = other DNA
gcatcccacccccaaagcaggaacaagctggccgccttcactcccgaacataaattcttgtgcagaccacgtcatcggcgccgaacgtctgcagagaaggaaaaccaatc

SEQ ID NO: 77631 - DNA, 110 bp, synthetic construct
  source 1..110: mol_type = other DNA
tcttgtgcagaccacgtcatcggcgccgaacgtctgcagagaaggaaaaccaatcagtgcagatgcctgtgcaaaaatgcttaaagcatatcactaataaggccactcac

SEQ ID NO: 77632 - DNA, 110 bp, synthetic construct
  source 1..110: mol_type = other DNA
ccgtgctctcccacttggctgcagatggaggaattcatggaactggggaatgcagtgcccgaggaggccctggacaccatcattgatgcccagcagcctaaccagtgctg

SEQ ID NO: 77633 - DNA, 110 bp, synthetic construct
  source 1..110: mol_type = other DNA
gatgtggtcctaaattcagctcaggtgagtacattataatcacagctccttcaagagtaacatttagaaataagcatgctctcagagttcccgttgtggcacagaagtca

SEQ ID NO: 77634 - DNA, 110 bp, synthetic construct
  source 1..110: mol_type = other DNA
aagttctctaatggtgcaggagtgggagggagcccacctgccaagagctgtgccgtaatggcccacactctggaagccaggatggggggacagtggagaatggcccatta

SEQ ID NO: 77635 - DNA, 110 bp, synthetic construct
  source 1..110: mol_type = other DNA
tttgtctgatgcacagtacccttatcttccaaatgggggccccctaaacaatcttcagagctagggtgaccaggtgtccttgtttgcccgggatggttctggttcgtacc

SEQ ID NO: 77636 - DNA, 110 bp, synthetic construct
  source 1..110: mol_type = other DNA
aggaaaatatgagcagtagtttcaacagctcacctctccctgcacctgctagtacatttaatttgtaccacagatctctggaagagggtgctgttaataaccccaaagca

SEQ ID NO: 77637 - DNA, 110 bp, synthetic construct
  source 1..110: mol_type = other DNA
gttccagtgcccatggaaacagcacatcagctcctgctcacggaatccacacaggcacaccactgccctgtggctctacctgaaccactcactcctctgtcctattactg

SEQ ID NO: 77638 - DNA, 110 bp, synthetic construct
  source 1..110: mol_type = other DNA
tggtcagggactcctgggaagggaatgatgtttcctcttacacatcccacctatggccttaatactgaagcacgtggtcagccaggaatgttagtgtcccctgtgaaggg

SEQ ID NO: 77639 - DNA, 110 bp, synthetic construct
  source 1..110: mol_type = other DNA
atgaaatactgacacccgtgaagatgcgctgaagctctgaatccatcactaacggcgtgaatagcagaggcagctgcctaatgagtgtcatcaattcagagaggagagga

SEQ ID NO: 77640 - DNA, 110 bp, synthetic construct
  source 1..110: mol_type = other DNA
ccctgttttactacacaggtgagaaatggggccaggagagaggcatggagacatgaaccctgatctggtagcatcatttccttctttttgaggagggaagacagcagtta

SEQ ID NO: 77641 - DNA, 110 bp, synthetic construct
  source 1..110: mol_type = other DNA
gggctttctctttaataaaatcctgggaaaaacttgactttaatgtcatcttacttgaggatgacttcctaattctagacttttaattatcctccaagacatgtcatagt

SEQ ID NO: 77642 - DNA, 110 bp, synthetic construct
  source 1..110: mol_type = other DNA
tgaggatgacttcctaattctagacttttaattatcctccaagacatgtcatagtcacactcttgagtcatctttaccaaccctattttcaaaaccttactttgtatcag

SEQ ID NO: 77643 - DNA, 110 bp, synthetic construct
  source 1..110: mol_type = other DNA
tcacatgtcctgcctcattgcaacgggactctttggtaagcggtactctctgcgctctccttccttactctgtgttctcatccaccaatagtgaagttgggatgatttgt

SEQ ID NO: 77644 - DNA, 110 bp, synthetic construct
  source 1..110: mol_type = other DNA
ccctggcattgaggatcacgcaggtaccaggtaaggcttagatgagggagctttgagagtacagaagggcagctcctaatcctatcagcaagttgggagggatgtgtcag

SEQ ID NO: 77645 - DNA, 110 bp, synthetic construct
  source 1..110: mol_type = other DNA
agagtacagaagggcagctcctaatcctatcagcaagttgggagggatgtgtcagggagggcttcctggaggcggtgactctgagccaaaccatgcaacacacaggagaa

SEQ ID NO: 77646 - DNA, 110 bp, synthetic construct
  source 1..110: mol_type = other DNA
aagaccctacatagaggataaaagacaaaggttctgtgcctgctctgtcatcttgggtgctccttgatctcagggaggccactctctcccagggcctccatcccctcctc

SEQ ID NO: 77647 - DNA, 110 bp, synthetic construct
  source 1..110: mol_type = other DNA
gtgtgaggtaaccggtctcatggccgagctggggtttgagatcagatcagcctgatgtcaaaacacttgttaaattgttcagactgttacagtaaaatggttgttaatac

SEQ ID NO: 77648 - DNA, 110 bp, synthetic construct
  source 1..110: mol_type = other DNA
gtgccaggaagacgacccattttgactccaccattctgcaggagtccaggacctctttctgtgtatggggtacagctgaagtgtgctctgtaccacagaaagcaggtttt

SEQ ID NO: 77649 - DNA, 110 bp, synthetic construct
  source 1..110: mol_type = other DNA
aacgctctatcaaagcttatcccagaagctcatttgacagtgataagagtaaccgagtatgatgaccatttctgcataaaagtaccaggaacagaaaagacttgagtaca

SEQ ID NO: 77650 - DNA, 110 bp, synthetic construct
  source 1..110: mol_type = other DNA
ctaataatggccttctgttcattccctgtggcctcgccctcgggcctgtcctgaaggccggttttgggtttatctacagggcaaagttgtcctgcggccattttggccca

SEQ ID NO: 77651 - DNA, 110 bp, synthetic construct
  source 1..110: mol_type = other DNA
gggtgggacagttatttgtctattcactcacacactcactggaacacgtgtcctggtaaagtgcaccccttgtgcaacaggcctgagctcaatgcccaaacaatgaaatt

SEQ ID NO: 77652 - DNA, 110 bp, synthetic construct
  source 1..110: mol_type = other DNA
gggaaaaatggggactgaatttggacagttggaggaacaaattcttttaaaccaataacatctacgatatgaactatttaaggttaataaaaggtatagaaaactccaat

SEQ ID NO: 77653 - DNA, 110 bp, synthetic construct
  source 1..110: mol_type = other DNA
aaattctgtatgaattctagaaactgaggcagaaaattatccccatcactgagactcagagggtcgatgggatacaccagtaggcattgacctggtgacaatggccctcg

SEQ ID NO: 77654 - DNA, 110 bp, synthetic construct
  source 1..110: mol_type = other DNA
tcagagggtcgatgggatacaccagtaggcattgacctggtgacaatggccctcgtgatgcgggaagagacctgtgcactgtgcctgtcctcctttgaccctgccaggaa

SEQ ID NO: 77655 - DNA, 110 bp, synthetic construct
  source 1..110: mol_type = other DNA
atcaagctactctatgaattgaagctccttatgaatctcaagaaggataaatacgaagatttttcttcatacatgagtacaagtctttttctaaagaccaaagacaggga

SEQ ID NO: 77656 - DNA, 110 bp, synthetic construct
  source 1..110: mol_type = other DNA
gtgacccaaccctccccccaccaattcccctttcctctgggtggtgccagagaaggccaagtagggagccagtactttcatcaccaccaggcattaacaagctccaccct

SEQ ID NO: 77657 - DNA, 110 bp, synthetic construct
  source 1..110: mol_type = other DNA
gccaagtagggagccagtactttcatcaccaccaggcattaacaagctccaccctgccccactttcagtgtcagtggagaccacatgggggagcctgaacctccacttcc

SEQ ID NO: 77658 - DNA, 110 bp, synthetic construct
  source 1..110: mol_type = other DNA
agattattcaaaatgacacggagctaaaactccgcatttgagtaccggggggctgctcatccacttggcaaggtctctgacacaacgttgggtgcaggaaaaggcgtttc

SEQ ID NO: 77659 - DNA, 110 bp, synthetic construct
  source 1..110: mol_type = other DNA
ttacctctgagccacgacggaaactcctgattagtctcttttctttcatacccaacatacagttaatcagcaagtgctctcagctctttgttgggaaagtatcctgaacc

SEQ ID NO: 77660 - DNA, 110 bp, synthetic construct
  source 1..110: mol_type = other DNA
tatggcacagtttgtggggcccataacaactgcaatagtaacatcaaagatcaaagatcaccacaacaaatataataataaaaagtttgggggttgtggctcaacaggtt

SEQ ID NO: 77661 - DNA, 110 bp, synthetic construct
  source 1..110: mol_type = other DNA
ccccgccccatacaacatggagctgttttgcaaaagatggaaatgctggctgttagtgtggcaggacagatggttgctcgtaaaggcaggcatggcttttccacttaccc

SEQ ID NO: 77662 - DNA, 110 bp, synthetic construct
  source 1..110: mol_type = other DNA
tcaacctcccaagtccatctcctcctagactgccaacaaaagccagcctaaatggtcatgtgttttcagtggctttctgcttggctctgggcccacagatgaagcgcact

SEQ ID NO: 77663 - DNA, 110 bp, synthetic construct
  source 1..110: mol_type = other DNA
tcatgtgttttcagtggctttctgcttggctctgggcccacagatgaagcgcactctttcacttccacacacaggatcctcctctcataactcctgactgctgtggtggt

SEQ ID NO: 77664 - DNA, 110 bp, synthetic construct
  source 1..110: mol_type = other DNA
actatgcatccaaccagcgagaggagtacctgctcctacggctctttaagacagcactacaggaggaaatcaagtacgaacagagttctacggagcatcgggcccttccc

SEQ ID NO: 77665 - DNA, 110 bp, synthetic construct
  source 1..110: mol_type = other DNA
actacaggaggaaatcaagtacgaacagagttctacggagcatcgggcccttcccactagctcacacgctcagagtctgagagtcaggcctgcccgtggcttttcgtggt

SEQ ID NO: 77666 - DNA, 110 bp, synthetic construct
  source 1..110: mol_type = other DNA
gtccctcagattgtacagcttgtctgccagcttcaccagtttagcccctgggctgctgtggggtgcctgctccacctgcaactgctttctctccagcttgggcagagtct

SEQ ID NO: 77667 - DNA, 110 bp, synthetic construct
  source 1..110: mol_type = other DNA
ctgtggggtgcctgctccacctgcaactgctttctctccagcttgggcagagtcttgtcatctgttacctcctccaccagacgccgcacttgtaccccaaagtgcagctc

SEQ ID NO: 77668 - DNA, 110 bp, synthetic construct
  source 1..110: mol_type = other DNA
ctaatcgtccctgtagctgtccagcagtttggggggtcaagagctaactgtagctttacttcatctttgtctgaagcagcagtgctttggaaggaagcattgtccctttt

SEQ ID NO: 77669 - DNA, 110 bp, synthetic construct
  source 1..110: mol_type = other DNA
gcgttgctcgtgaacttggcctgtctggctggctcgtgatggatggtgaaacccgctgacaagttcagccggagggacctcccctgctgtggcggcgggagaaacacaca

SEQ ID NO: 77670 - DNA, 110 bp, synthetic construct
  source 1..110: mol_type = other DNA
cttaggatccagtgaccagcggctctggctccatggcctttcccgctcttccccgactcagccccgtgcgccgtgccctctcaatcagagcttctcagtaattgaaagtc

SEQ ID NO: 77671 - DNA, 110 bp, synthetic construct
  source 1..110: mol_type = other DNA
gggagggaaaaggtggaggggctttgagcagacaccgggctaaggatgttagtaacacccagctccatttaagcgtcagactgtgagctaagtccgtgcatctccttaga

SEQ ID NO: 77672 - DNA, 110 bp, synthetic construct
  source 1..110: mol_type = other DNA
agagttgctgtcacaggggaagtgggtgaccctggggctgccatgggcgccagtctctctctacccggccctgtgtctcttccgctggcaggcgagaagccatgtgagca

SEQ ID NO: 77673 - DNA, 110 bp, synthetic construct
  source 1..110: mol_type = other DNA
tctctctacccggccctgtgtctcttccgctggcaggcgagaagccatgtgagcaggtccagttcaagcccaatacagtgaacaccttggcctgccctctcctctccaac

SEQ ID NO: 77674 - DNA, 110 bp, synthetic construct
  source 1..110: mol_type = other DNA
cttttacatcttattcttaacaggttctacaagttcttctggttcaccttccaaacacaagaaaataatgttagctgccacctgtcttatcacaaaaagataaaaattca

SEQ ID NO: 77675 - DNA, 110 bp, synthetic construct
  source 1..110: mol_type = other DNA
cacaagaaaataatgttagctgccacctgtcttatcacaaaaagataaaaattcattaatggcaaaactttctgaaatttttcagtgcctatgatggttatccctttgca

SEQ ID NO: 77676 - DNA, 110 bp, synthetic construct
  source 1..110: mol_type = other DNA
gactccgttcatactgccaagtgaaaaacacttttaggagttcccgtcatggcgaagctgaaaagaatctgagtaggaaccacgaggttgcgggttggatccctggcttc

SEQ ID NO: 77677 - DNA, 110 bp, synthetic construct; identical to SEQ ID NO: 77676
  source 1..110: mol_type = other DNA

SEQ ID NO: 77678 - DNA, 110 bp, synthetic construct
  source 1..110: mol_type = other DNA
attggggctcacaggagtgggagccaagacaggaagaaggggatgccgggcaccctttgcatcttttgtagggcactgtcagcctctcctccccacctggagggaaagag

SEQ ID NO: 77679 - DNA, 110 bp, synthetic construct
  source 1..110: mol_type = other DNA
ctcctcatggactctggtctcacatggaattctcatcttggccatatgctccatacacagaatccccattctcctcacacaatgagctgtgaccctgaccacacatggag

SEQ ID NO: 77680 - DNA, 110 bp, synthetic construct
  source 1..110: mol_type = other DNA
cacagaatccccattctcctcacacaatgagctgtgaccctgaccacacatggagcctcgacgttggtcacaaaatgagcttcgacctttgtgacacaaagagctcgacc

SEQ ID NO: 77681 - DNA, 110 bp, synthetic construct; identical to SEQ ID NO: 77679
  source 1..110: mol_type = other DNA

SEQ ID NO: 77682 - DNA, 110 bp, synthetic construct
  source 1..110: mol_type = other DNA
tcttggccatatgctccatacacagaatccccattctcctcacacaatgagctgtgaccctgaccacacatggagcctcgacgttggtcacaaaatgagcttcgaccttt

SEQ ID NO: 77683 - DNA, 110 bp, synthetic construct
  source 1..110: mol_type = other DNA
acttcactcaggcagaggtaaggacccctctctacagccaccacttagactccggcctggaatagcccactctgcctctggacacacatgtggacatgggtacgagctcc

SEQ ID NO: 77684 - DNA, 110 bp, synthetic construct
  source 1..110: mol_type = other DNA
aagaatgcctggcatggggagaagctcactgtggagtctttgccagatgtcccagcagacaccccacgcaagaaggtgccatcgagggacgggcccttgccaggagctgg

SEQ ID NO: 77685 - DNA, 110 bp, synthetic construct
  source 1..110: mol_type = other DNA
cagacaccccacgcaagaaggtgccatcgagggacgggcccttgccaggagctgggggcagagaacaagatgggtcagctgggggtaatagggatccagtcaccagcgtc

SEQ ID NO: 77686 - DNA, 110 bp, synthetic construct; identical to SEQ ID NO: 77684
  source 1..110: mol_type = other DNA

SEQ ID NO: 77687 - DNA, 110 bp, synthetic construct; identical to SEQ ID NO: 77685
  source 1..110: mol_type = other DNA

SEQ ID NO: 77688 - DNA, 110 bp, synthetic construct
  source 1..110: mol_type = other DNA
cgaagccagagagggagagggattggctccaggtcacacagcttgtctgagatgtccccagagtcttcctaggcccagcctcctaccagctgtgtgggtgccttggagct

SEQ ID NO: 77689 - DNA, 110 bp, synthetic construct
  source 1..110: mol_type = other DNA
ccccagagtcttcctaggcccagcctcctaccagctgtgtgggtgccttggagctgggtgagaggggccatacccaagctctagggtgccctcgcaccacctgcaccctg

SEQ ID NO: 77690 - DNA, 110 bp, synthetic construct
  source 1..110: mol_type = other DNA
gagagtcaaaggagagagaggaagggcaagctgggggtctcagctgggcacaaaccagggcagaggacacctatcagcacaaatgggtggcaaggttgtctggcaggatc

SEQ ID NO: 77691 - DNA, 110 bp, synthetic construct
  source 1..110: mol_type = other DNA
agaggatttgaaatggaatttatttgcggtggggtagacctcggacactaggaagaggggataaagggtacctggcaccggcgcaactttacaaagacagctggggcggc

SEQ ID NO: 77692 - DNA, 110 bp, synthetic construct
  source 1..110: mol_type = other DNA
aggggataaagggtacctggcaccggcgcaactttacaaagacagctggggcggccatccagggcacaggagacatggccttgctgaagctgaggttgcatgctggcaca

SEQ ID NO: 77693 - DNA, 110 bp, synthetic construct
  source 1..110: mol_type = other DNA
aacaaatagcagctgttggagttcctgctgcggtgcagtgggtcgcaatgggtctgattgctccagctcaggttgctgcggaggtgcagtttgatcattggccagtgcag

SEQ ID NO: 77694 - DNA, 110 bp, synthetic construct
  source 1..110: mol_type = other DNA
gattgctccagctcaggttgctgcggaggtgcagtttgatcattggccagtgcagtgggttagggattctggtattgccaccgctgcgacataggtcacagctgtggctc

SEQ ID NO: 77695 - DNA, 110 bp, synthetic construct
  source 1..110: mol_type = other DNA
ccacctttgggtgggggaggggaaccaggagccacagccccaggacacaggccaggttcacacaggaggcgacttagctcaacagcactttaactttgctcacccaaaaa

SEQ ID NO: 77696 - DNA, 110 bp, synthetic construct
  source 1..110: mol_type = other DNA
agttggataagtcaaggaataaagctccagaagttgggaaaggcaagaaaatggatcctttcttagagtctctggaagaagcatggtccggcagataacctggttttggc

SEQ ID NO: 77697 - DNA, 110 bp, synthetic construct
  source 1..110: mol_type = other DNA
gcaccaactggggtcctgcttctatattcctgtctgtttggagcaaagccagctcactgggcaggtttgagtaactataaccgccttgcactctgggtaccatctctcag

SEQ ID NO: 77698 - DNA, 110 bp, synthetic construct
  source 1..110: mol_type = other DNA
actgggcaggtttgagtaactataaccgccttgcactctgggtaccatctctcaggttggtttggtatggtcagggggaaggttctggaggccccacctggatgcccaac

SEQ ID NO: 77699 - DNA, 110 bp, synthetic construct
  source 1..110: mol_type = other DNA
gccttttgtgtagtggaaaatctgagtataattacagtgggccctttattatctgtggttcttccatatttgcagctctacagcttcagactcagccatctgtgagtagt

SEQ ID NO: 77700 - DNA, 110 bp, synthetic construct
  source 1..110: mol_type = other DNA
tggttcttccatatttgcagctctacagcttcagactcagccatctgtgagtagtatagttctgtaatatatactagtgaaaaaatccacgcataagtggacaaaccacg

SEQ ID NO: 77701 - DNA, 110 bp, synthetic construct
  source 1..110: mol_type = other DNA
aatgacttttgaaagctgcagaaatttttagtggcggtgtcaagattatatattgttcctttgactttcagcctagtagcctctgtgacatgcctttcagatagaagttt

SEQ ID NO: 77702 - DNA, 110 bp, synthetic construct
  source 1..110: mol_type = other DNA
tggataacctgttaacttatttaatcctcattttatttttttcctattacatctcctgatcttagtggttacagtggggcttgcctatggctatggggtgctgaacaggg

SEQ ID NO: 77703 - DNA, 110 bp, synthetic construct
  source 1..110: mol_type = other DNA
ctgatcttagtggttacagtggggcttgcctatggctatggggtgctgaacaggggtaggccaaattttgtgttctggatgaggagaggttttgaaacatccagggtata

SEQ ID NO: 77704 - DNA, 110 bp, synthetic construct
  source 1..110: mol_type = other DNA
aaacatctaaatagttatctgaaaatgttcagacttcttggggcccaggtcactacagaatttaacatctcatgtccctaagagtccttttctctcttgcattggctggt

SEQ ID NO: 77705 - DNA, 110 bp, synthetic construct
  source 1..110: mol_type = other DNA
cagaatttaacatctcatgtccctaagagtccttttctctcttgcattggctggtatagttgaggccttgggaccctagtccacatttttgctgtattaaaatgatgtag

SEQ ID NO: 77706 - DNA, 110 bp, synthetic construct
  source 1..110: mol_type = other DNA
gatagagaaaggacaccaaagaaaatacccttaatgactcacctaaacagtaataaattagaaacatcatttgagctatattcttgttggctgtttatcacaatgattcc

SEQ ID NO: 77707 - DNA, 110 bp, synthetic construct
  source 1..110: mol_type = other DNA
aattagaaacatcatttgagctatattcttgttggctgtttatcacaatgattcctctgcaggcttaacaacgattctacctttcaattgggtggaatgaactataataa

SEQ ID NO: 77708 - DNA, 110 bp, synthetic construct; identical to SEQ ID NO: 77706
  source 1..110: mol_type = other DNA

SEQ ID NO: 77709 - DNA, 110 bp, synthetic construct; identical to SEQ ID NO: 77707
  source 1..110: mol_type = other DNA

SEQ ID NO: 77710 - DNA, 110 bp, synthetic construct
  source 1..110: mol_type = other DNA
cctgaaatttcctttttcccatctctgaggttgattttctgaagacgaggccatctctttgggatgtcaggcttatgttatcgcatcctgttctttactccccatccaca

SEQ ID NO: 77711 - DNA, 110 bp, synthetic construct
  source 1..110: mol_type = other DNA
accccagcattccatcaagcttttcagtgtagaaatcaggccaaattctggctttttcccaagccatggctgccaggaccatatagagaaacatctggctggacggttgg

SEQ ID NO: 77712 - DNA, 110 bp, synthetic construct
  source 1..110: mol_type = other DNA
ggttaggctacatgtggaagatatgcttacagacaagttgtgtggtatttctgggagttagctaaccctgggcagggctgttcctcccctgtccacaaggccccaagata

SEQ ID NO: 77713 - DNA, 110 bp, synthetic construct
  source 1..110: mol_type = other DNA
gtagaataaagaataaggaatgtagagttgtcggaattgggattgagacctggcgctgaacctgaagcagctgtgagatcctaagcgagtcactcagcctccatgcacct

SEQ ID NO: 77714 - DNA, 110 bp, synthetic construct
  source 1..110: mol_type = other DNA
ttaaagaatccatttcccattttcagcagttggctacattaacaagctgagccatgaaaggattagatctgctaagtgagtgcctggtctgtgcaccattgctaaacaca

SEQ ID NO: 77715 - DNA, 110 bp, synthetic construct
  source 1..110: mol_type = other DNA
agggggaagaaggaagattagcaataataggatccagaggaggagctgtcacagagacgggaatctcagagagactcgggatcatggaagcctggggaggagaaaattct

SEQ ID NO: 77716 - DNA, 110 bp, synthetic construct
  source 1..110: mol_type = other DNA
aaaacagtgtctaacttgagggccactgctgatgcctaatggttgaaatttgtgctgtctactatagtcaccactcaacacacgtgtctgtttaaatttaaatttggggg

SEQ ID NO: 77717 - DNA, 110 bp, synthetic construct
  source 1..110: mol_type = other DNA
tgtctactatagtcaccactcaacacacgtgtctgtttaaatttaaatttgggggagtttcctggtggctgagtgggttaaggatccagctaaggctcaggttgctgctg

SEQ ID NO: 77718 - DNA, 110 bp, synthetic construct; identical to SEQ ID NO: 77716
  source 1..110: mol_type = other DNA

SEQ ID NO: 77719 - DNA, 110 bp, synthetic construct; identical to SEQ ID NO: 77717
  source 1..110: mol_type = other DNA

SEQ ID NO: 77720 - DNA, 110 bp, synthetic construct
  source 1..110: mol_type = other DNA
tgcttttcttcccatgtgaagcagtgaaatagataacttacacattctaaaaactgggaagtagagggaacctacaacttgacgtgcacttggccatgaaagactgcctg

SEQ ID NO: 77721 - DNA, 110 bp, synthetic construct
  source 1..110: mol_type = other DNA
gggaagtagagggaacctacaacttgacgtgcacttggccatgaaagactgcctgttgaaagtgggattcacttcagaaactgtaggcaattgaaaaagagagagcttac

SEQ ID NO: 77722 - DNA, 110 bp, synthetic construct
  source 1..110: mol_type = other DNA
atgaacttggagaaatttagagtccaccttaaatcacagtgaagactaaaggtgcagaccaggagtgagcccctggaagctaaggccaaatataaagacatgttacagtt

SEQ ID NO: 77723 - DNA, 110 bp, synthetic construct
  source 1..110: mol_type = other DNA
agactggggagatcaggtatggggaagtcaggaattgagggctccagacagccagaaggtcacggccagaatgccaaagctacagccacccctgcagtaccctcttttgt

SEQ ID NO: 77724 - DNA, 110 bp, synthetic construct
  source 1..110: mol_type = other DNA
gaaatgctgtccccgaaggtgttctagtccagactgagcaactgtcatgttagagatgcgtagatgaagcctgccatttggtaatagatcatgatttaaattccctgttt

SEQ ID NO: 77725 - DNA, 110 bp, synthetic construct
  source 1..110: mol_type = other DNA
atgcgtagatgaagcctgccatttggtaatagatcatgatttaaattccctgtttattgtatgactcttacaaggctgacccaaatgaaaactatgttttcttaacatga

SEQ ID NO: 77726 - DNA, 110 bp, synthetic construct; identical to SEQ ID NO: 77724
  source 1..110: mol_type = other DNA

SEQ ID NO: 77727 - DNA, 110 bp, synthetic construct; identical to SEQ ID NO: 77725
  source 1..110: mol_type = other DNA

SEQ ID NO: 77728 - DNA, 110 bp, synthetic construct
  source 1..110: mol_type = other DNA
cctaagtcagtcatggttataccattcccctttaaaaggggttatgtgatccaattctagttccagagatatgagagaccaagagggcagagagcttctgagcaaacttt

SEQ ID NO: 77729 - DNA, 110 bp, synthetic construct
  source 1..110: mol_type = other DNA
tctagttccagagatatgagagaccaagagggcagagagcttctgagcaaactttttctccttgtggttgttctgtcagaatgtgaaacctaaaactgccagtcattttt

SEQ ID NO: 77730 - DNA, 110 bp, synthetic construct
  source 1..110: mol_type = other DNA
tccctctcctgtgcttccatctttttgtctgtgattatgttcgacttagtccactcagccttttagcttgttgtcttactggtagaattgaagatccttcagggcaaggc

SEQ ID NO: 77731 - DNA, 110 bp, synthetic construct
  source 1..110: mol_type = other DNA
tcctatttcaagatgcattccctctgtgcaggaggtgaagggcggtttggctgttgacagttttgagctgtcagcccagcccagccgccctagaggaatgagagcgcctg

SEQ ID NO: 77732 - DNA, 110 bp, synthetic construct
  source 1..110: mol_type = other DNA
caatcatctttgttgaatgaatgaagaccaaatatgtgggtcctaatgccaagcatctcgggccatttcctaggctcactaaattttggggactcctgctttagaagctc

SEQ ID NO: 77733 - DNA, 110 bp, synthetic construct
  source 1..110: mol_type = other DNA
tctcgggccatttcctaggctcactaaattttggggactcctgctttagaagctctgctgatgaggaatcaagccataaatagatttaatttgggccttattttggctct

SEQ ID NO: 77734 - DNA, 110 bp, synthetic construct
  source 1..110: mol_type = other DNA
aaaccaggaatggtgaagaaccaatggggacagacaggaaagttggaatgccacgaaagcatctttctaccaaaatgacaatgatcactactgcccctatagtttgcttg

SEQ ID NO: 77735 - DNA, 110 bp, synthetic construct
  source 1..110: mol_type = other DNA
ttgagtaatcactaatcatgtttgttaagtattaaaatacaagtgtgcattcttttacagtggggagtagatgttatattgtgtgagcaaggcttttgctgatgtatttc

SEQ ID NO: 77736 - DNA, 110 bp, synthetic construct
  source 1..110: mol_type = other DNA
tacagtggggagtagatgttatattgtgtgagcaaggcttttgctgatgtatttcctttctccattaaggggatgtttgatttttattgaataactttttgctggttttt

SEQ ID NO: 77737 - DNA, 110 bp, synthetic construct; identical to SEQ ID NO: 77735
  source 1..110: mol_type = other DNA

SEQ ID NO: 77738 - DNA, 110 bp, synthetic construct; identical to SEQ ID NO: 77736
  source 1..110: mol_type = other DNA

SEQ ID NO: 77739 - DNA, 110 bp, synthetic construct
  source 1..110: mol_type = other DNA
tcaaattgctaaatgatataggtcaacaattttttaactcttcaaagtcaagtcacctacttgatcatgtctttatctatatgtgtagtgctccttcaaaggcaagggaa

SEQ ID NO: 77740 - DNA, 110 bp, synthetic construct
  source 1..110: mol_type = other DNA
agtgagaagaaatgccagtaatcaaggtgaataacagtcatgggaggtatgtgatagctcaaggctttaccgttgtcataaaagtggtgcagttttagagctttaagatg

SEQ ID NO: 77741 - DNA, 110 bp, synthetic construct
  source 1..110: mol_type = other DNA
ctttagattggagatcttctatagatcttcaactaatgccagtgaattaagctgcatctctttcctcttcctcttttaaaaaaaaacaaaaaacaaaaaacccccctaat

SEQ ID NO: 77742 - DNA, 110 bp, synthetic construct
  source 1..110: mol_type = other DNA
atctctttcctcttcctcttttaaaaaaaaacaaaaaacaaaaaacccccctaatttctacatctaaaatgttgggtcccactttgacatctaggtgattaacgatgaaa

SEQ ID NO: 77743 - DNA, 110 bp, synthetic construct
  source 1..110: mol_type = other DNA
gaattaacaaatagtttactctcttacccccaaaacaaggcagacagtttcctgcagggaaacaagtttggcataggcaccatgggccttgcggtttttcatagaggctc

SEQ ID NO: 77744 - DNA, 110 bp, synthetic construct
  source 1..110: mol_type = other DNA
agggaaacaagtttggcataggcaccatgggccttgcggtttttcatagaggctcagcaccatgtttgccatgaatgaggcttgagaatgcagaatttcacagaggtaat

SEQ ID NO: 77745 - DNA, 110 bp, synthetic construct
  source 1..110: mol_type = other DNA
ttggttgttcatatattagtaatttatgttccattaccccttccaaatgctttatagagtatatgaagaagcatggaccctacctttaaaagcttatggttaaatggggg

SEQ ID NO: 77746 - DNA, 110 bp, synthetic construct
  source 1..110: mol_type = other DNA
agagtatatgaagaagcatggaccctacctttaaaagcttatggttaaatgggggacactcagcatttgttgggtttctagataagtcaagcactaagccaagaaccatg

SEQ ID NO: 77747 - DNA, 110 bp, synthetic construct
  source 1..110: mol_type = other DNA
actggtagggtttgttaccgctaagccacaatgggaactcctttttttcctctaaagtcgcatagctaccaagtgtcagagccaagattcaaacctaggtcttttaaaat

SEQ ID NO: 77748 - DNA, 110 bp, synthetic construct
  source 1..110: mol_type = other DNA
taatgtaattatcctatgaggggttagtttctgctattatctcagtcttatagattaggaaaacaaaactcagagaggctaaggccacaaagctagtaagtcaaagtcga

SEQ ID NO: 77749 - DNA, 110 bp, synthetic construct
  source 1..110: mol_type = other DNA
taggaaaacaaaactcagagaggctaaggccacaaagctagtaagtcaaagtcgataatatccacaatgaattaatacttgtaatacatttagaagagtgttaggacatg

SEQ ID NO: 77750 - DNA, 110 bp, synthetic construct; identical to SEQ ID NO: 77748
  source 1..110: mol_type = other DNA

SEQ ID NO: 77751 - DNA, 110 bp, synthetic construct; identical to SEQ ID NO: 77749
  source 1..110: mol_type = other DNA

SEQ ID NO: 77752 - DNA, 110 bp, synthetic construct
  source 1..110: mol_type = other DNA
gtctcaccaggctgtagtcaaagcactggctgggttgtgttcacatctgaaagctcacctaggggaaaaaatctggttccagcttcctgcaggttgttagcagaattcac

SEQ ID NO: 77753 - DNA, 110 bp, synthetic construct
  source 1..110: mol_type = other DNA
cacctaggggaaaaaatctggttccagcttcctgcaggttgttagcagaattcacttctttgctgttgtatgactgagggccctcacttcttattgaccagtggctagag

SEQ ID NO: 77754 - DNA, 110 bp, synthetic construct; identical to SEQ ID NO: 77752
  source 1..110: mol_type = other DNA

SEQ ID NO: 77755 - DNA, 110 bp, synthetic construct; identical to SEQ ID NO: 77753
  source 1..110: mol_type = other DNA

SEQ ID NO: 77756 - DNA, 110 bp, synthetic construct
  source 1..110: mol_type = other DNA
tctagacaagaaggctctctgcctttacttttgacacatgctaatttcatctactaatgtacagtgagtgtcacctggggtgtagatctttagagtatttaaataaatcc

SEQ ID NO: 77757 - DNA, 110 bp, synthetic construct
  source 1..110: mol_type = other DNA
aggcccccatgtgtagtttgaattacccattacactcagtgtaaattatcctcgttgatagaagcttttagatattctgagaatctttgttacttagtgacaggttggta

SEQ ID NO: 77758 - DNA, 110 bp, synthetic construct
  source 1..110: mol_type = other DNA
taccagtgttctatgaacaactccaaaattcatgtgaagaaaaaggaattatgggagctgaggggtcggaggatggatatgcaatcctaagacacaaatgcatgaaggag

SEQ ID NO: 77759 - DNA, 110 bp, synthetic construct
  source 1..110: mol_type = other DNA
taatttctcagtcaaaatttctgtttcctctttatttgcattgctaaagcttaatgtgtggaagcaataagtactctacatgagttagctaatttgttgtcttgacacac

SEQ ID NO: 77760 - DNA, 110 bp, synthetic construct
  source 1..110: mol_type = other DNA
ctttctgacttacttcacttagcgtaataatctctaggactattggatacttttcttgagggaagaattgaaatggcagttccacttcagcttcagtcagaaacttcatg

SEQ ID NO: 77761 - DNA, 110 bp, synthetic construct
  source 1..110: mol_type = other DNA
ttgagggaagaattgaaatggcagttccacttcagcttcagtcagaaacttcatgatttttagctcagtctttgttccatgaagtcattagcttgctaaggagactctgg

SEQ ID NO: 77762 - DNA, 110 bp, synthetic construct
  source 1..110: mol_type = other DNA
tgtctccaagaaactagtctttgtgagcctagctcccatttgcaaggccgcataggactacaggaagccgccagagtttttggcacagggattcctttctactgtctccc

SEQ ID NO: 77763 - DNA, 110 bp, synthetic construct
  source 1..110: mol_type = other DNA
aacagtgccagaaaagctggtggtggcagcatccattttcacgagaaggttgctggtgtctcctctctgatggagctgtgggctgcccaccagggaatagcacaagatac

SEQ ID NO: 77764 - DNA, 110 bp, synthetic construct
  source 1..110: mol_type = other DNA
ttttcacgagaaggttgctggtgtctcctctctgatggagctgtgggctgcccaccagggaatagcacaagatacaggacccttgtcagtggccttgtgaaggctcacat

SEQ ID NO: 77765 - DNA, 110 bp, synthetic construct
  source 1..110: mol_type = other DNA
gaatataatacggttgaataaatttatgaggaaagcttaacccatttgtaattcggtgaatgcaaattagaacacaatgagatggcattataaacctcctagattggcaa

SEQ ID NO: 77766 - DNA, 110 bp, synthetic construct
  source 1..110: mol_type = other DNA
attccatagactaatactggtatattgatattttggccattgaattatttcctgctattcaccatgaatattccatcagcgtcttccatatgagtaatagacagtagcta

SEQ ID NO: 77767 - DNA, 110 bp, synthetic construct
  source 1..110: mol_type = other DNA
tattcaccatgaatattccatcagcgtcttccatatgagtaatagacagtagctaaagtaacctcctaacttccctgatgctttttaggacaggttttttttagtttata

SEQ ID NO: 77768 - DNA, 110 bp, synthetic construct
  source 1..110: mol_type = other DNA
tgtggattgatagctaccgtgtttctattcacattatttattctttgcccctaccctctttccttgccttctcttcttttgacattttatgtgattctactgtatctcct

SEQ ID NO: 77769 - DNA, 110 bp, synthetic construct
  source 1..110: mol_type = other DNA
ctctttccttgccttctcttcttttgacattttatgtgattctactgtatctcctctcttagaatgacaattatacctaaagaaatttaagttatcaccttagggcttgc

SEQ ID NO: 77770 - DNA, 110 bp, synthetic construct
  source 1..110: mol_type = other DNA
tttccaagtacaatactatcaagtagatatgtaaaaggtatacatctttgaaaaatataactctattatctagctgaatattcggtggggaatggaagcaatcaaaagct

SEQ ID NO: 77771 - DNA, 110 bp, synthetic construct
  source 1..110: mol_type = other DNA
tataactctattatctagctgaatattcggtggggaatggaagcaatcaaaagcttaagcgtgcacaatatttcaatatggacgtaaacacacatatataaacacctagt

SEQ ID NO: 77772 - DNA, 110 bp, synthetic construct; identical to SEQ ID NO: 77770
  source 1..110: mol_type = other DNA

SEQ ID NO: 77773 - DNA, 110 bp, synthetic construct; identical to SEQ ID NO: 77771
  source 1..110: mol_type = other DNA

SEQ ID NO: 77774 - DNA, 110 bp, synthetic construct
  source 1..110: mol_type = other DNA
agaaggaaggccaatgtcagctaactgaatgaaataacaggtatagggattgctttaaaaatgtaaagcaatacatatctagtgtgtaatatggcagtcttaaataaaat

SEQ ID NO: 77775 - DNA, 110 bp, synthetic construct
  source 1..110: mol_type = other DNA
ttgagctgcttcctgggtgagagaacccctgtgtaggcaggttgcatagtttcaaatattcctagaaaggagcttctgtcacttcctagaatcatatcagaaggttctag

SEQ ID NO: 77776 - DNA, 110 bp, synthetic construct
  source 1..110: mol_type = other DNA
tgcagtctttccaaactgtttggttcctctatctctacacgtgggggttacctagaaagcacgaaaatatactccaaccctaatcaattgagtcacagagtccctctgca

SEQ ID NO: 77777 - DNA, 110 bp, synthetic construct
  source 1..110: mol_type = other DNA
agatctagaaacagaaactaaatgccttaaggcacccagctctcatgggatagccagatctcagcagcaagcaggagcacctccacagacaaggtctgagccttactgct

SEQ ID NO: 77778 - DNA, 110 bp, synthetic construct
  source 1..110: mol_type = other DNA
gcatgcatcataccactgtgccccagactattgtagtcatttgccactgctttcatatggcctaacaggattaggagctcatcagctaaattccaggtctgttttctgga

SEQ ID NO: 77779 - DNA, 110 bp, synthetic construct
  source 1..110: mol_type = other DNA
tatggcctaacaggattaggagctcatcagctaaattccaggtctgttttctggaggttggaatgtgactcaccatctaaaaaaatgcatattttatgtaggctctcctc

SEQ ID NO: 77780 - DNA, 110 bp, synthetic construct
  source 1..110: mol_type = other DNA
tcatccccttcctctggatttcaaagtcgcctgacactgacacagaattgcctttcccaagcttggacttggacttggactttaccttctattaggcaccttcaccatct

SEQ ID NO: 77781 - DNA, 110 bp, synthetic construct
  source 1..110: mol_type = other DNA
cccaagcttggacttggacttggactttaccttctattaggcaccttcaccatctcataattcagtctccatttatatctctatgtctttagccactctcaccttctgtt

SEQ ID NO: 77782 - DNA, 110 bp, synthetic construct
  source 1..110: mol_type = other DNA
acctgcagcagcagcaactacagtcacacaaagagcctgtttcctttgttttccggcatcagtgggtgtagcttgtgagggtatatcttgtggagcctaagccacttgct

SEQ ID NO: 77783 - DNA, 110 bp, synthetic construct
  source 1..110: mol_type = other DNA
aagcatggcaagtcagagaggttagatgaatcggtcatctaatattaataagctaaatagtcagtgcctctgtttcacccgagctggctcttgcctctcaggtgagaaac

SEQ ID NO: 77784 - DNA, 110 bp, synthetic construct
  source 1..110: mol_type = other DNA
atttgtgtggggaacccgagggacatgaagaccagcttcaaggtcaggtttcccgccctggggagagggactcagggaggtctggggaggggagaggccatgctttcatg

SEQ ID NO: 77785 - DNA, 110 bp, synthetic construct
  source 1..110: mol_type = other DNA
gcaaagggccttcccctccgcacttggacttacctctgcttggccccatggaggcttagacctcaagccacctaggcatttcctaagcttggcagctcttgactctctca

SEQ ID NO: 77786 - DNA, 110 bp, synthetic construct
  source 1..110: mol_type = other DNA
tcatcgtgacccctcaccagacacagatgagcagggcacaccgtacactgcacatctgctccctctgagctcctgccagagacaggctggctaaggtcacacagccgctc

SEQ ID NO: 77787 - DNA, 110 bp, synthetic construct
  source 1..110: mol_type = other DNA
gatgccatgagaatatgaaggatagcagaccacatgaataaaagcaaaaacttaagttttttgtttgataagctgtgcctgctttatttctcatctggcagtcttctcac

SEQ ID NO: 77788 - DNA, 110 bp, synthetic construct
  source 1..110: mol_type = other DNA
gttttttgtttgataagctgtgcctgctttatttctcatctggcagtcttctcacactggactgctttattccttatgccaccttttcctcatatctgaagtgttactat

SEQ ID NO: 77789 - DNA, 110 bp, synthetic construct
  source 1..110: mol_type = other DNA
cttcactgtttcgcctattttgagagtaaatatcaattatgcgagtcatttctctactggaagactgtcgataccagtacattatatagtaagcaaagctgactgtgaac

SEQ ID NO: 77790 - DNA, 110 bp, synthetic construct
  source 1..110: mol_type = other DNA
actggaagactgtcgataccagtacattatatagtaagcaaagctgactgtgaacttgcattccaaggtcacagattgtccctcttcctcatacaccacatctgtagata

SEQ ID NO: 77791 - DNA, 110 bp, synthetic construct
  source 1..110: mol_type = other DNA
acagtggctgtattaggcattgtttgtaccttgttcaaattctctcgaaaacctcattggtgctcattccccaccttctgtgcgctttcctggaagcagcttaggtaata

SEQ ID NO: 77792 - DNA, 110 bp, synthetic construct
  source 1..110: mol_type = other DNA
attggtgctcattccccaccttctgtgcgctttcctggaagcagcttaggtaatagctgacttctgtgggtatcctaagaccagctcccctttctccaagtgggatatac

SEQ ID NO: 77793 - DNA, 110 bp, synthetic construct
  source 1..110: mol_type = other DNA
ttatcatgtttatttatcctgataatgatggcagtattattggccacagaatcacatagctagtactcaggccctaaaaccggtattgatttcttttccccccactcagg

SEQ ID NO: 77794 - DNA, 110 bp, synthetic construct
  source 1..110: mol_type = other DNA
atagctagtactcaggccctaaaaccggtattgatttcttttccccccactcaggatcgtgtcctgataaaccgtattgacctcgtctgccaggctgtactctcagggaa

SEQ ID NO: 77795 - DNA, 110 bp, synthetic construct
  source 1..110: mol_type = other DNA
ggcataagatcaccctgtagtcttctgtgctaatcttttctcttgctcaggtaagcaatagctctgaggaataaggatttgcatgctgcctacaatataatagttaaatg

SEQ ID NO: 77796 - DNA, 110 bp, synthetic construct
  source 1..110: mol_type = other DNA
caatagctctgaggaataaggatttgcatgctgcctacaatataatagttaaatgcttttcttgacaatatcaaagcaaaaacaacaataaatatacatgctgcattagt

SEQ ID NO: 77797 - DNA, 110 bp, synthetic construct
  source 1..110: mol_type = other DNA
taagaggaggaaaaaggtaaaaacacagtgaagtcttgtgcatttcacttttattctgaattagtgctggaattataagtgtcagccttttaaggtgttctgataaccca

SEQ ID NO: 77798 - DNA, 110 bp, synthetic construct
  source 1..110: mol_type = other DNA
ctgaattagtgctggaattataagtgtcagccttttaaggtgttctgataacccagacaagaaatgtcaaatgtgccatcctttcttcagtgttcatcatggtttgttaa

SEQ ID NO: 77799 - DNA, 110 bp, synthetic construct
  source 1..110: mol_type = other DNA
gagaaaaggaagttatcctgtcaaagttggataaagttgcattccaatgtatgtattttggagattcataattgctggaggctagctctggcggccagggagtgtacact

SEQ ID NO: 77800 - DNA, 110 bp, synthetic construct
  source 1..110: mol_type = other DNA
gttgcattccaatgtatgtattttggagattcataattgctggaggctagctctggcggccagggagtgtacacttttcctgaaggagagggacgcgcgtcagcttttgc

SEQ ID NO: 77801 - DNA, 110 bp, synthetic construct
  source 1..110: mol_type = other DNA
attactttattttttctttttatggctatacctgtggcatatgggagttgcccgggattcaaattggattcaataggattcacattggagctacagctgcagcttatgcc

SEQ ID NO: 77802 - DNA, 110 bp, synthetic construct
  source 1..110: mol_type = other DNA
ctttttatggctatacctgtggcatatgggagttgcccgggattcaaattggattcaataggattcacattggagctacagctgcagcttatgccacagccacaggaatg

SEQ ID NO: 77803 - DNA, 110 bp, synthetic construct
  source 1..110: mol_type = other DNA
gcctgattctattaccaaaacaaacctgacacaagaaaaaaattctccagcagtgttgctatcacagtccttcctcccacaatttgcagttacagcaccttacctgcagg

SEQ ID NO: 77804 - DNA, 110 bp, synthetic construct
  source 1..110: mol_type = other DNA
ctatgtccagcttttagctaggggctcgcaaagctagggtactatttcttgagttcctaatccatatatttaactgcctacttacttggatgcttcagagttagctccct

SEQ ID NO: 77805 - DNA, 110 bp, synthetic construct
  source 1..110: mol_type = other DNA
cctaatccatatatttaactgcctacttacttggatgcttcagagttagctccctatcaacaagtctaaaaataaactatttgtctcctcaaatcttcttttctttcaag

SEQ ID NO: 77806 - DNA, 110 bp, synthetic construct
  source 1..110: mol_type = other DNA
tcttccaccctccaggatgccagtggtttggtggacttccgagatgtcacgctcgcattggcagctctggatgggagcaggagcctagaggagctgacttgcctggcctt

SEQ ID NO: 77807 - DNA, 110 bp, synthetic construct
  source 1..110: mol_type = other DNA
cattggcagctctggatgggagcaggagcctagaggagctgacttgcctggccttcgaggtacctggaaattgtgagggcggaggggcacgtggttgctgtgcttacccc

SEQ ID NO: 77808 - DNA, 110 bp, synthetic construct; identical to SEQ ID NO: 77806
  source 1..110: mol_type = other DNA

SEQ ID NO: 77809 - DNA, 110 bp, synthetic construct; identical to SEQ ID NO: 77807
  source 1..110: mol_type = other DNA

SEQ ID NO: 77810 - DNA, 110 bp, synthetic construct
  source 1..110: mol_type = other DNA
ccgattctattgagccacagcaggaactcctcagctgcctttgtaaaggctgcgggttctagaggctgggctatcatcctagctgtcacatcaggttaaaacacttaaat

SEQ ID NO: 77811 - DNA, 110 bp, synthetic construct
  source 1..110: mol_type = other DNA
catccatctgacctcatcacctgccagcagcatggtctccaccactccctctgcttcagcaacacgccctttcccctattctccagacacataagctcctactacagggc

SEQ ID NO: 77812 - DNA, 110 bp, synthetic construct
  source 1..110: mol_type = other DNA
tcagcaacacgccctttcccctattctccagacacataagctcctactacagggcctttgcacatgcgattccctctgaaaagctcttccttcaatattctcacggctca

SEQ ID NO: 77813 - DNA, 110 bp, synthetic construct
  source 1..110: mol_type = other DNA
cacttagtggccgagacagaggcccacaaagttaccttaaagaaagtatctctaagcatagtcagattggaccagaagttgatctgaatgtgcttaagtcagtttagagg

SEQ ID NO: 77814 - DNA, 110 bp, synthetic construct
  source 1..110: mol_type = other DNA
gcatagtcagattggaccagaagttgatctgaatgtgcttaagtcagtttagaggttaagagaaagtcgctgcttatggaagcagttgatgactggcaccatttgacatc

SEQ ID NO: 77815 - DNA, 110 bp, synthetic construct
  source 1..110: mol_type = other DNA
tcaacaataataatgcacagaatattctcttaattcttaaaaatcttacaaaaagaagctggtaaggttagcagagtgtggctttttggaaccatctaaataagagagta

SEQ ID NO: 77816 - DNA, 110 bp, synthetic construct
  source 1..110: mol_type = other DNA
ggaaatggatatttatttggcttcccaaagtaagctgaaaaatcacttctctggcattcagacagcatcctggggatattctgataaagtgacagtcataaaatgaacaa

SEQ ID NO: 77817 - DNA, 110 bp, synthetic construct
  source 1..110: mol_type = other DNA
aaagaactgtggtaggggaatttctcggtagctcaacggactaaggatgtggtgttgttacttctgtggcacggatttgatcccaggactgggaacttccacataccatg

SEQ ID NO: 77818 - DNA, 110 bp, synthetic construct
  source 1..110: mol_type = other DNA
tttgcctagaccttgagggtgttccgtgtccaggaaaatgttctctgtgaagcttaaatctgtgctgttttgaataaccacaccctgctgccattcccttttggccccaa

SEQ ID NO: 77819 - DNA, 110 bp, synthetic construct
  source 1..110: mol_type = other DNA
aaatctgtgctgttttgaataaccacaccctgctgccattcccttttggccccaaagagcactcaggcgagtgagaagagggaagaataggccccactttcctgcccatc

SEQ ID NO: 77820 - DNA, 110 bp, synthetic construct
  source 1..110: mol_type = other DNA
ctgcaatcataaatgcaccaatgactaaaagggctatttctaatcttctcttacgtattttctcagggtgtcacaataatagtactctatgccagaaaatgtgttaattg

SEQ ID NO: 77821 - DNA, 110 bp, synthetic construct
  source 1..110: mol_type = other DNA
gggactttcatcttgctagcagacggttgactctcaatcttcttatgaagaagtccctgtggcaagcaactgagggtggcctccagccattagccatgagcaaaaaagaa

SEQ ID NO: 77822 - DNA, 110 bp, synthetic construct
  source 1..110: mol_type = other DNA
tttatacaaagttcttaactgctgataatgacttagcaggttatctatcccagtgtaactgaacttaagaggtaattcttagttttaaggtcagatttttcagatctttc

SEQ ID NO: 77823 - DNA, 110 bp, synthetic construct
  source 1..110: mol_type = other DNA
tgagggctcatgtgagcagagtgggcccacctgtataatccagggcaggcttccgagctttaagtctgtgaaaacactggaaaatatagctgttattttatagtagcttt

SEQ ID NO: 77824 - DNA, 110 bp, synthetic construct
  source 1..110: mol_type = other DNA
catgcagtagttcaagacattctgcaagaaactggtggcccctttttatatttccatgtgaattggactcctgacttcaccacgtcctagctatgtgatcttgaataagt

SEQ ID NO: 77825 - DNA, 110 bp, synthetic construct
  source 1..110: mol_type = other DNA
atgtgaattggactcctgacttcaccacgtcctagctatgtgatcttgaataagttgcttgatttctctgtgcctacttctttgtgtatgtggaaatagaaggttgtctt

SEQ ID NO: 77826 - DNA, 110 bp, synthetic construct
  source 1..110: mol_type = other DNA
aattgacatctacattttaaaagaagaatgccagtctaaggagatacgtctattcccctgtggtcaaacttcaataaaacaaagaaacatacacaagtggatgcatctta

SEQ ID NO: 77827 - DNA, 110 bp, synthetic construct
  source 1..110: mol_type = other DNA
gccctcatccctatgaagacctcggtaaagataaaaattaatacaaccattgactgttaacaaaattgaggatcattcccactaattggaaggatggccaaaaaaggaag

SEQ ID NO: 77828 - DNA, 110 bp, synthetic construct
  source 1..110: mol_type = other DNA
cagtatgtattcatacttaattaccttttcctctaggaaagaccacacttttgtgctcccagagtcccaatcaaattcttcacagataatgcttcttttgatatttttac

SEQ ID NO: 77829 - DNA, 110 bp, synthetic construct
  source 1..110: mol_type = other DNA
ctcccagagtcccaatcaaattcttcacagataatgcttcttttgatatttttacttgatatgtgtctccaacttaaaataacccaaattggtttcattaccttctcaac

SEQ ID NO: 77830 - DNA, 110 bp, synthetic construct
  source 1..110: mol_type = other DNA
ttctcgccacgctttctcatgagtgttaccttctgctttgttggaggagattctctttgttggaagattccttccctttgtctttcttcttatctcttgccagtcattct

SEQ ID NO: 77831 - DNA, 110 bp, synthetic construct
  source 1..110: mol_type = other DNA
tttgttggaagattccttccctttgtctttcttcttatctcttgccagtcattctgaaacccaaaccgaatcaccaagggacagatttcacatatttagaattttattaa

SEQ ID NO: 77832 - DNA, 110 bp, synthetic construct
  source 1..110: mol_type = other DNA
ttatgtgccatctctgtctcagcactaatagcagcaacacagatcctgtggaaagaccaagagtatcctaaagctttccttagaacaatcaacacaagaggccacggcaa

SEQ ID NO: 77833 - DNA, 110 bp, synthetic construct
  source 1..110: mol_type = other DNA
aaaccccaaataggagaatttctctcactgctgggattttagtagagttattcctcagcaagaagttattctcctttacagaaagagcttttgtttgctgtagggccttg

SEQ ID NO: 77834 - DNA, 110 bp, synthetic construct
  source 1..110: mol_type = other DNA
cacacacacacacacacacacacaaagttccagcctcaaataagccataggctatgtgagcctgtggagaaattaggacatatccaagctattctaataccttgggttgc

SEQ ID NO: 77835 - DNA, 110 bp, synthetic construct
  source 1..110: mol_type = other DNA
ataacccatgtaaaaaatgcctttcttcctcaattctaggaataattatatttttcttcagctgctattttgtcatatagatcccctgagtgatagtaataactgcacac

SEQ ID NO: 77836 - DNA, 110 bp, synthetic construct; identical to SEQ ID NO: 77835
  source 1..110: mol_type = other DNA

SEQ ID NO: 77837 - DNA, 110 bp, synthetic construct
  source 1..110: mol_type = other DNA
tcagaaaactctgacctggttgttggctgtgagatgctgtcaccaatcatgtgggccctgaaagctctttcctgggcctggactcaacaccgaaggtagaatctgctaca

SEQ ID NO: 77838 - DNA, 110 bp, synthetic construct
  source 1..110: mol_type = other DNA
ccctgaaagctctttcctgggcctggactcaacaccgaaggtagaatctgctacataattttgcagcccagtgtgaaatgaaatttcaggccccttgttttaaaattatt

SEQ ID NO: 77839 - DNA, 110 bp, synthetic construct
  source 1..110: mol_type = other DNA
tggtcaccaatcctcttctgtcctaggtcagacttcgaaggcaccttcgaagcgaggggaacacacagtttgggagctctctgcagtccggtttcttcagctactaatgg

SEQ ID NO: 77840 - DNA, 110 bp, synthetic construct
  source 1..110: mol_type = other DNA
gtgagagctttgcttgcaggagctgtggagccaagccagaaggatgaagcttgctatggtgaagaggatgctggaggggcagctgggaggggtaaaggatggagagtacc

SEQ ID NO: 77841 - DNA, 110 bp, synthetic construct
  source 1..110: mol_type = other DNA
cattagggaaatgtgacccagaagctgttagcaggtcatcaggagggctccagcccagccaggctgaggttggaggacctcaaaatgggcctttccttctgttcagaaca

SEQ ID NO: 77842 - DNA, 110 bp, synthetic construct
  source 1..110: mol_type = other DNA
ggactgggagctccatatgccttagggtggccaaaaaagaaaagaataaaacccctacccctctgcctattccagcttacatcctgcctttcatggggaggggggtgggt

SEQ ID NO: 77843 - DNA, 110 bp, synthetic construct
  source 1..110: mol_type = other DNA
tacccctctgcctattccagcttacatcctgcctttcatggggaggggggtgggtcccagtttgtccccaccatgaccacaggctgctttgtctccatccctctcaagct

SEQ ID NO: 77844 - DNA, 110 bp, synthetic construct
  source 1..110: mol_type = other DNA
acaagaacatgtatgtaaatggataatgcacacaaatgcacagaatataatagcgaaacacgtcctacaaaatccagtgatgataagtattctgactctatttcacagga

SEQ ID NO: 77845 - DNA, 110 bp, synthetic construct
  source 1..110: mol_type = other DNA
aaacacgtcctacaaaatccagtgatgataagtattctgactctatttcacaggaacatggttattcggtgatatgggcagttaaacctgtacaagttaaatgtgttcgt

SEQ ID NO: 77846 - DNA, 110 bp, synthetic construct; identical to SEQ ID NO: 77844
  source 1..110: mol_type = other DNA

SEQ ID NO: 77847 - DNA, 110 bp, synthetic construct; identical to SEQ ID NO: 77845
  source 1..110: mol_type = other DNA

SEQ ID NO: 77848 - DNA, 110 bp, synthetic construct
  source 1..110: mol_type = other DNA
aggtgtagagtaagaatgttacctgccatatcagtaaacaaaggatgttatggtcatcatgccaacagctactgctgccactcgcaactgtggaccctcatgggtttcag

SEQ ID NO: 77849 - DNA, 110 bp, synthetic construct
  source 1..110: mol_type = other DNA
atcatgccaacagctactgctgccactcgcaactgtggaccctcatgggtttcaggatggaggaaagcagaatactggccccagatagtgaaggtgtttgacaaataaat

SEQ ID NO: 77850 - DNA, 110 bp, synthetic construct
  source 1..110: mol_type = other DNA
tgtaggcatggcattgggaagtcattagaagctgggcaaccatcccagtttgtatctccaacattctgtcccttggctgcctggtgtgtgtgtgttgtggggagcggtgg

SEQ ID NO: 77851 - DNA, 110 bp, synthetic construct
  source 1..110: mol_type = other DNA
aaactactcactagtgttagcaactagacattggtcctgctgggaagctctgaggaattgtatagaatatgcaattgtatagaaagactgagaaatgccaccccagtatt

SEQ ID NO: 77852 - DNA, 110 bp, synthetic construct
  source 1..110: mol_type = other DNA
gagaggaaagcaggtgtgaaagcagattgtgaaaaggggaagctaccccacccaggcacgctgtacaggatcgtgctttgccatggttgccaccccagatggtgtgtggt

SEQ ID NO: 77853 - DNA, 110 bp, synthetic construct
  source 1..110: mol_type = other DNA
gcacgctgtacaggatcgtgctttgccatggttgccaccccagatggtgtgtggtcaggccttctcatttgaggtcatctgcagaacacttgtgtttctgtttggtaggt

SEQ ID NO: 77854 - DNA, 110 bp, synthetic construct
  source 1..110: mol_type = other DNA
ctccttgtccccctgctgacccctatctgagctgctaagggcttccctccccatatttgtaatattgctggtaaacatattgcactttctgtgatctacacctcacggct

SEQ ID NO: 77855 - DNA, 110 bp, synthetic construct
  source 1..110: mol_type = other DNA
tttgtaatattgctggtaaacatattgcactttctgtgatctacacctcacggctgctgctgtgtgttaaagatgtagatacacttggttcaaagaagggacagcattta

SEQ ID NO: 77856 - DNA, 110 bp, synthetic construct
  source 1..110: mol_type = other DNA
ctcattatcaatgccttttgatagcatttatgtgattagtcatgggaccacaggtaacgatctgcaaaggggcctttaaagataaggggttacctagatcactgagatat

SEQ ID NO: 77857 - DNA, 110 bp, synthetic construct
  source 1..110: mol_type = other DNA
acctccagcagcttgatgagcatcctcccatcccgcaggtccttatagaggtcggtgatgcggcaggacacgcgcgccaggtgcgagttgacccatttcgtgaaggtctt

SEQ ID NO: 77858 - DNA, 110 bp, synthetic construct
  source 1..110: mol_type = other DNA
aaaatgaaaacctgttccttattgggatttgaaaggcacagcttgcagaataagtgaaaatacaaaagttttacatgttatgactggctacataaggggagaaaagagga

SEQ ID NO: 77859 - DNA, 110 bp, synthetic construct
  source 1..110: mol_type = other DNA
ggttctgctcgatgggagctgtgtcaaaattaacacttaggattctgaacataccccaggtggtaatttctaagtaacttgcctaaaagtgtagaatagccttcagtgaa

SEQ ID NO: 77860 - DNA, 110 bp, synthetic construct
  source 1..110: mol_type = other DNA
taatagatctagattatccttggcttttcacctgtgagagactgagccaaatggcctcagtgaatccatgtttgtcttgacagccattctgtttacaatcccttcaacac

SEQ ID NO: 77861 - DNA, 110 bp, synthetic construct
  source 1..110: mol_type = other DNA
ctcagtgaatccatgtttgtcttgacagccattctgtttacaatcccttcaacacagcttgaacctcttccgttcctcatccttccccataaactcaccattccagtctc

SEQ ID NO: 77862 - DNA, 110 bp, synthetic construct; identical to SEQ ID NO: 77860
  source 1..110: mol_type = other DNA

SEQ ID NO: 77863 - DNA, 110 bp, synthetic construct; identical to SEQ ID NO: 77861
  source 1..110: mol_type = other DNA

SEQ ID NO: 77864 - DNA, 110 bp, synthetic construct
  source 1..110: mol_type = other DNA
aggtattactttttggaactttctgaaattttttaaaaagtatttttgatcctcatttggttgaatctgcagatttggaactcatggatatagagggccaaatgtagtat

SEQ ID NO: 77865 - DNA, 110 bp, synthetic construct
  source 1..110: mol_type = other DNA
tttggttgaatctgcagatttggaactcatggatatagagggccaaatgtagtatccttttcttaccctttttgtgtgattttacctctgtggctattgttaaccctgtc

SEQ ID NO: 77866 - DNA, 110 bp, synthetic construct
  source 1..110: mol_type = other DNA
aataccatcggtgtatactgacttggcatcaccaagaaccactgccttgggcacaaagtacaggtgagtcattcacacccttaggtatctctatgcacctgttccattaa

SEQ ID NO: 77867 - DNA, 110 bp, synthetic construct
  source 1..110: mol_type = other DNA
aagtacaggtgagtcattcacacccttaggtatctctatgcacctgttccattaaaacacaaatttatatataacctccttcctggagtatccctaattttgtaattatt

SEQ ID NO: 77868 - DNA, 110 bp, synthetic construct; identical to SEQ ID NO: 77866
  source 1..110: mol_type = other DNA

SEQ ID NO: 77869 - DNA, 110 bp, synthetic construct; identical to SEQ ID NO: 77867
  source 1..110: mol_type = other DNA

SEQ ID NO: 77870 - DNA, 110 bp, synthetic construct
  source 1..110: mol_type = other DNA
tttggagtaccctgtaccggaactactctaaccagaaatccccaggactggaggctggtgcctctaagcgcctggtgtgcgtcggggacagtggtttagtgtctcagcta

SEQ ID NO: 77871 - DNA, 110 bp, synthetic construct
  source 1..110: mol_type = other DNA
tggtgcctctaagcgcctggtgtgcgtcggggacagtggtttagtgtctcagctaaatgagcctcccactttcacttttcactttcctctgctttcacttttcccttttt

SEQ ID NO: 77872 - DNA, 110 bp, synthetic construct
  source 1..110: mol_type = other DNA
agagagctgggacattagcccgacaccagacctcttggcaggaaaccggatggccataaacaccccgttgctcagtgttgggactgtgcctgtcccctgctgtcatcccc

SEQ ID NO: 77873 - DNA, 110 bp, synthetic construct
  source 1..110: mol_type = other DNA
ataaacaccccgttgctcagtgttgggactgtgcctgtcccctgctgtcatccccaaaccaataggtcgggttcaaaaattcattagaggttttccctagtacgtcaagg

SEQ ID NO: 77874 - DNA, 110 bp, synthetic construct
  source 1..110: mol_type = other DNA
agtaagttgctacattagggttgagctttgggcctgtccttgccacttgatgttctgtttgataggttgtttcttgccttaacctgctgtaggtcactataaggacaaca

SEQ ID NO: 77875 - DNA, 110 bp, synthetic construct
  source 1..110: mol_type = other DNA
tgtttgataggttgtttcttgccttaacctgctgtaggtcactataaggacaacaccctccccccgcccccccccccccacattcacatttgatttaaaataaggctccc

SEQ ID NO: 77876 - DNA, 110 bp, synthetic construct
  source 1..110: mol_type = other DNA
cagcagccattctgtgctcacgatgtgataaatcaatatactaaggatgttgacgtcattggatgtcagtcctggactgtctactttcagactttgtcttatatgaggca

SEQ ID NO: 77877 - DNA, 110 bp, synthetic construct
  source 1..110: mol_type = other DNA
ggatgtgcctttgcgtagttttctttatctttctcatcatttgttgagctgctatcatcttttttttttccttcccatcagttatggtaactttttgagactcaggtttt

SEQ ID NO: 77878 - DNA, 110 bp, synthetic construct; identical to SEQ ID NO: 77877
  source 1..110: mol_type = other DNA

SEQ ID NO: 77879 - DNA, 110 bp, synthetic construct
  source 1..110: mol_type = other DNA
agcagggaaacttgttccttctggtgagtcactggttgagtaaagataaagtgtccggagtacaaacggcctcttgtttgcacggggcctggcattcgttcatatccctg

SEQ ID NO: 77880 - DNA, 110 bp, synthetic construct
  source 1..110: mol_type = other DNA
cggagtacaaacggcctcttgtttgcacggggcctggcattcgttcatatccctgcttcgttttcttctcaaggaaacaggctctgttcccatccccatcccagctccct

SEQ ID NO: 77881 - DNA, 110 bp, synthetic construct
  source 1..110: mol_type = other DNA
acctagctgttgtaacctgattcatagctccctctgtgcagctctggtttctgataaggaccttccatgaaagaagcctcactcacccctgtaccagctgcacactattg

SEQ ID NO: 77882 - DNA, 110 bp, synthetic construct
  source 1..110: mol_type = other DNA
gcaggagacagacacagggatgggaccagcgtctgttccctgctcacctacaaaggttccacacccaagacctgagggaatgtcctgaggtctcccagtcggacgtgacc

SEQ ID NO: 77883 - DNA, 110 bp, synthetic construct
  source 1..110: mol_type = other DNA
gacaagccacattagttggagtgcaagggctctggtgtggattttctggggtgactgaggatggtccaagctcacttgactccggttttcctttgcacaaggctcttgct

SEQ ID NO: 77884 - DNA, 110 bp, synthetic construct
  source 1..110: mol_type = other DNA
tgaggatggtccaagctcacttgactccggttttcctttgcacaaggctcttgcttcctccttaccccatttccgatgccttgctactgctgcatattgtaatcagagcc

SEQ ID NO: 77885 - DNA, 110 bp, synthetic construct
  source 1..110: mol_type = other DNA
ctctctggcgccccctggagttaatgccacaaatacaggcattcctcagtctcgcctggcagtggggccccccggcagtcctttggccagtagagatgacctctcctcca

SEQ ID NO: 77886 - DNA, 110 bp, synthetic construct
  source 1..110: mol_type = other DNA
aacctgggccacagcagggacctgagctgctgcagtgacgaaatcatccctaacctgctgcgccacaaaggaactcctgttttttactttttattttatttttttgtctt

SEQ ID NO: 77887 - DNA, 110 bp, synthetic construct
  source 1..110: mol_type = other DNA
agtgatttaactgagctctggcctcagcttattttacatgaccatctcaaaaaacccagtgtcctcagcaaaatctcttatctgcacctatatatatatatatagaatgg

SEQ ID NO: 77888 - DNA, 110 bp, synthetic construct
  source 1..110: mol_type = other DNA
cagttctcaattaaaaataaatatgccaggaaaaagcgccaaatcaaaattaaccacacatattctaattacctgcacaaatttgggtggaaatttttgtctaaggtcca

SEQ ID NO: 77889 - DNA, 110 bp, synthetic construct
  source 1..110: mol_type = other DNA
acacatattctaattacctgcacaaatttgggtggaaatttttgtctaaggtccagcagtaaagcatccacacgttgtctctggaaaatagagcttggttcttctttcct

SEQ ID NO: 77890 - DNA, 110 bp, synthetic construct
  source 1..110: mol_type = other DNA
agcaaaaaaaaaaaagtgaaaatacacatatgtgaaagaggtgctgatgactagtggaagtatatgcttcagagcaaaatgaaatgggcagtcaggaaaactttctgttc

SEQ ID NO: 77891 - DNA, 110 bp, synthetic construct
  source 1..110: mol_type = other DNA
atctgaatcaaagcacagaattctaaggcaatcattgtagatttaaagcactagcaacgtgtccaccctgctggattcccgatatcctgaagcgttccctgaaagaatac

SEQ ID NO: 77892 - DNA, 110 bp, synthetic construct
  source 1..110: mol_type = other DNA
agagcttcacttctggaccaagccctgcccaacgacgtcctcttcagtagcacgtacccttctctccccaagtctcttccgttgcggaggccgtcctacaccttgggaat

SEQ ID NO: 77893 - DNA, 110 bp, synthetic construct
  source 1..110: mol_type = other DNA
gtcgtcggggctatgctccctctgaatgctctaaggaagcatcctcccctgcctcttcctagcctgtggaggctgccactgatccttgacattccttggcttgtagcagc

SEQ ID NO: 77894 - DNA, 110 bp, synthetic construct
  source 1..110: mol_type = other DNA
ttgtatgcatgggctgcttcttacatcaaaaggggacacctccctcccttttcatctgggctggccttggtgccttatttaatggagtatggcagatgtaacattctgag

SEQ ID NO: 77895 - DNA, 110 bp, synthetic construct
  source 1..110: mol_type = other DNA
ctgggctggccttggtgccttatttaatggagtatggcagatgtaacattctgagaacagaccataaagcagctctgtggcttctaccttgatcatctgagacattctct

SEQ ID NO: 77896 - DNA, 110 bp, synthetic construct
  source 1..110: mol_type = other DNA
gagtggaaatgaatccaactagtatccataaggatgcacatgaggacgcaggttccatccttggcctcactcagcgggttaaagatctggtattgctgtgatatgtggta

SEQ ID NO: 77897 - DNA, 110 bp, synthetic construct
  source 1..110: mol_type = other DNA
catccttggcctcactcagcgggttaaagatctggtattgctgtgatatgtggtataggtcgaagacgagtctcagatcctgagttgttgtggctgtggctgtggctgtg

SEQ ID NO: 77898 - DNA, 110 bp, synthetic construct
  source 1..110: mol_type = other DNA
ctcacagaggatgacaggtacagctctgcttccaaatctagtcacctgtgcagctgtgagtcacacagcctccccccaccccgcccgattttctgagatgagctgcacca

SEQ ID NO: 77899 - DNA, 110 bp, synthetic construct
  source 1..110: mol_type = other DNA
gtgagtcacacagcctccccccaccccgcccgattttctgagatgagctgcaccaacccagacccccttctcctctgggcatgttcccaggcattaccagatttgtacac

SEQ ID NO: 77900 - DNA, 110 bp, synthetic construct
  source 1..110: mol_type = other DNA
ccattagtgctggacatagatttacatgaaaattacttaaagcattgttttcaggctttaaagtacacaggaactagctgaagattgggttaaagtgtagattctcattt

SEQ ID NO: 77901 - DNA, 110 bp, synthetic construct
  source 1..110: mol_type = other DNA
gccacagggtggacaaaatagaaaaaaaaaaaaagataggtccttgacattcatgggagaactttgtgaattcctaagtttgtgataacctatgtaacatatcatttttg

SEQ ID NO: 77902 - DNA, 110 bp, synthetic construct
  source 1..110: mol_type = other DNA
gcagaagtgagcacttaaagactctgcattctgagtggttagatctcaactagagtaagttttaagccttatttaacattaatagattaatgcaaataaaatgtgttttc

SEQ ID NO: 77903 - DNA, 110 bp, synthetic construct; identical to SEQ ID NO: 77902
  source 1..110: mol_type = other DNA

SEQ ID NO: 77904 - DNA, 110 bp, synthetic construct
  source 1..110: mol_type = other DNA
caggaagtagggaagttgaagtcagtgatgcgaaaggggctgcactgcaggtatctgagccaaggtgaggattttcctgccccgatccagctggtcgtcatctaaccccc

SEQ ID NO: 77905 - DNA, 110 bp, synthetic construct
  source 1..110: mol_type = other DNA
tgagccaaggtgaggattttcctgccccgatccagctggtcgtcatctaacccccccggggtctggcctctctagagacccttgctggcttctgcaggtcctggggcaga

SEQ ID NO: 77906 - DNA, 110 bp, synthetic construct
  source 1..110: mol_type = other DNA
gccaggcctaggggctgcggctaaggccggcacttcgtcctgggcctcccagtgccaaggcaagaaggtcgacaggctctgaaacaccatcatcatgatgcgctacctaa

SEQ ID NO: 77907 - DNA, 110 bp, synthetic construct
  source 1..110: mol_type = other DNA
ggtgaggattaaatgaaataaaatcttcaaaccgttgaaaacagcgtctagcacgtagcatacactcagtaaattaagctgtcatgaaacgagaacaggctgaaactgaa

SEQ ID NO: 77908 - DNA, 110 bp, synthetic construct
  source 1..110: mol_type = other DNA
tttctgtgctggggaaggatgttctttgcccttgtgggtgcttgctgagttggcgtggatacaggcccttgtgttttctggcgatttgggtttcctcttcttccttaact

SEQ ID NO: 77909 - DNA, 110 bp, synthetic construct
  source 1..110: mol_type = other DNA
gcagaggagagatcaagaggtgggaatgcttgatgagctcagatgcaaagatggatgatatttaattgcctgtgaataagatttcattgaattcagtcatttttacatga

SEQ ID NO: 77910 - DNA, 110 bp, synthetic construct
  source 1..110: mol_type = other DNA
ccctggcctcgctcagtgtgtttaaggatttggcatttccgaaagttgcagcttaggttgatctggccttgctggggctgtgacataggctggcacctgcagctcagatt

SEQ ID NO: 77911 - DNA, 110 bp, synthetic construct
  source 1..110: mol_type = other DNA
ggatttggcatttccgaaagttgcagcttaggttgatctggccttgctggggctgtgacataggctggcacctgcagctcagattcgacccctggcctggagatttccat

SEQ ID NO: 77912 - DNA, 110 bp, synthetic construct
  source 1..110: mol_type = other DNA
ttgctggaggtcagctggggctcaaagaggggtagttcccccgagctgagctgaccttctttgtttgctagaaagcagggctgactatatacctggggcccaatgagact

SEQ ID NO: 77913 - DNA, 110 bp, synthetic construct
  source 1..110: mol_type = other DNA
cccgctgcctccatctccccactgctccagcagagatggcccagggcccagggtggtgtgatgaaaaaagcacgagcttttggtgtgagcttttggtgtctgctgacttg

SEQ ID NO: 77914 - DNA, 110 bp, synthetic construct
  source 1..110: mol_type = other DNA
gtgtgatgaaaaaagcacgagcttttggtgtgagcttttggtgtctgctgacttgggctggaacccttgttttcccattcatatgctgcgtaaccaggagcaagttccta

SEQ ID NO: 77915 - DNA, 110 bp, synthetic construct
  source 1..110: mol_type = other DNA
ttgtaacccattggaccacaaaggcctaattaagtacttttatttgagagggtaatggcaaacttgtccaagactttgttccgctgttgatgagtatttgagctgttttc

SEQ ID NO: 77916 - DNA, 110 bp, synthetic construct
  source 1..110: mol_type = other DNA
tggcaaacttgtccaagactttgttccgctgttgatgagtatttgagctgttttcagatgggtgttattaatgaatagtgaggctttgaatatttgtgcatccgtttctc

SEQ ID NO: 77917 - DNA, 110 bp, synthetic construct
  source 1..110: mol_type = other DNA
ccttagcactctgctctgggctgagcaagctgctgtgctgtgggagaagccccaggggacagcagaggaaccgctggaggtgggaagctacctgcttctcagtaaccctc

SEQ ID NO: 77918 - DNA, 110 bp, synthetic construct
  source 1..110: mol_type = other DNA
ttcttaacctcctcatagtgtcacagagaagagaagacagaatctaaatgctggggctgaccttgatgatggtggaagttaaaggctttcaagttagatggaaatattca

SEQ ID NO: 77919 - DNA, 110 bp, synthetic construct
  source 1..110: mol_type = other DNA
tggtagcctcgcgcccggctgagtggtgaagatggttgcggtgtctgtctgccggctgcctcagtgggtgttactccaggatctttagctttggacacgtgagatcccct

SEQ ID NO: 77920 - DNA, 110 bp, synthetic construct
  source 1..110: mol_type = other DNA
gattacagttgcactgagaacccagatactaagaataattatttagcaagagtaagtaagccatttgtttctgctggcagaagaaatgttgaattgtgtagctgggaggg

SEQ ID NO: 77921 - DNA, 110 bp, synthetic construct
  source 1..110: mol_type = other DNA
atgttgcttcattcactcggcacacgtttaaagagcacctgacaggagcaaatgctctgagtactgagtacctagtggaattgctgatatggaaaacgaatccctgacct

SEQ ID NO: 77922 - DNA, 110 bp, synthetic construct
  source 1..110: mol_type = other DNA
atactaagcagtactctgtatatagtccaggccctattggatgccaggtcaccactagggtgagatagctcacaaatactgctaaccaaaataggggcaagtatgttttg

SEQ ID NO: 77923 - DNA, 110 bp, synthetic construct
  source 1..110: mol_type = other DNA
ttgccagctcttgtatgggctgttagaggtgtagctctccaggggaaatgtccgtctccacactttgggatttgggttctagtagtaaacatagagtggcagtgattggt

SEQ ID NO: 77924 - DNA, 110 bp, synthetic construct
  source 1..110: mol_type = other DNA
tccctgcttccattccttggctcacgcccatttattcttcatatggaaacacaaccagaattatgatgcaactctttaaaatgcaaaacacatcataaacgccctcccct

SEQ ID NO: 77925 - DNA, 110 bp, synthetic construct
  source 1..110: mol_type = other DNA
gtgttccacactgcttctatccctctgaaggagatgatgttatttctgagtctgttaggctctgagctcttgctctgggatatattactcagagttcaagtagagagata

SEQ ID NO: 77926 - DNA, 110 bp, synthetic construct
  source 1..110: mol_type = other DNA
aatgtcttttttgttatctccggataaatcttcatgatggaatgtgcagccgttccacctcttcagtcttctgccttcttccccagtggacactcaattgctgcggaagg

SEQ ID NO: 77927 - DNA, 110 bp, synthetic construct
  source 1..110: mol_type = other DNA
cacctcttcagtcttctgccttcttccccagtggacactcaattgctgcggaaggcaaaaattaaattaattaattaataatgcagcgatacctttattctttgtttaaa

SEQ ID NO: 77928 - DNA, 110 bp, synthetic construct
  source 1..110: mol_type = other DNA
cccctgggacaggactcttgcacgtaagcaagaggccattgttccagtgttccaagcatgagttataacagctttgagattgtcatgagctgtagacttatctgctcttc

SEQ ID NO: 77929 - DNA, 110 bp, synthetic construct
  source 1..110: mol_type = other DNA
aactgactcacatgaacataaagggtaaacatggcccgtgaatacttgaagaaatgaatttagagacatttttagaaagacagaggacagagtatggtgacaagcattaa

SEQ ID NO: 77930 - DNA, 110 bp, synthetic construct
  source 1..110: mol_type = other DNA
agtgttgcgtgtgacttctacagctaggttaggagaggcaatgcagcttctacactctttcccaggttgcttgtgctaggagcgctgaggctgccatgctaggaggaaat

SEQ ID NO: 77931 - DNA, 110 bp, synthetic construct
  source 1..110: mol_type = other DNA
tctttcccaggttgcttgtgctaggagcgctgaggctgccatgctaggaggaaatggagccatgtggagattctccaataggcaatcatagtctctgaatcctccccagc

SEQ ID NO: 77932 - DNA, 110 bp, synthetic construct
  source 1..110: mol_type = other DNA
gtatgtggtgtcggtcacggacatggcttagatcccatgttgctgtggtgaaggtcagcagctgcagctccaattttacagccagcctgggtacttccatatgccccacg

SEQ ID NO: 77933 - DNA, 110 bp, synthetic construct
  source 1..110: mol_type = other DNA
cagcagctgcagctccaattttacagccagcctgggtacttccatatgccccacgtttggccctcaaaaaaccccatatttaaaatgggtggagttcccttgcggtgcag

SEQ ID NO: 77934 - DNA, 110 bp, synthetic construct
  source 1..110: mol_type = other DNA
cattggactgcatatttatcaattgttagcctaactagctttccaagactagagtcctaatcaatatatcactggcaaagatttgtataatatacctgccagttttgggg

SEQ ID NO: 77935 - DNA, 110 bp, synthetic construct
  source 1..110: mol_type = other DNA
tctcttatcctatgaagggagacatcacacatgatcaccactaagaggaagctaacatttacatgaaattcattaggagggcaaacttaggcaggacatagctcttagca

SEQ ID NO: 77936 - DNA, 110 bp, synthetic construct
  source 1..110: mol_type = other DNA
ataggagaggcatctctagctagtgcagtagcttctggatccttgccagccactgatggtaatgaatctgctccttcttggctcctgccttgttcttatagctgcaggag

SEQ ID NO: 77937 - DNA, 110 bp, synthetic construct
  source 1..110: mol_type = other DNA
cctcattttaatcatttagatgggttatgtttgctagtataaatcatttagttttcagaaactatagatggaaactactttttatccacctaaatccattattcagcccc

SEQ ID NO: 77938 - DNA, 110 bp, synthetic construct; identical to SEQ ID NO: 77937
  source 1..110: mol_type = other DNA

SEQ ID NO: 77939 - DNA, 110 bp, synthetic construct
  source 1..110: mol_type = other DNA
ggttaatttattatacacgacatatactgtagtaggttaaaacatgttccacttcctaaaagatatatacatccttgttatggtttgattgcaccctcccgcatttcata

SEQ ID NO: 77940 - DNA, 110 bp, synthetic construct
  source 1..110: mol_type = other DNA
ctaaaagatatatacatccttgttatggtttgattgcaccctcccgcatttcatatgttgaactcctcacccctagtacctcaggatatgactgtatttggagatagggt

SEQ ID NO: 77941 - DNA, 110 bp, synthetic construct
  source 1..110: mol_type = other DNA
cattttctttaggctagtttggattgatagtagagtaatcaacagttttgatcgcctttgccttttctggaggtggaattcactggcatcctctttctgcaatctcacac

SEQ ID NO: 77942 - DNA, 110 bp, synthetic construct
  source 1..110: mol_type = other DNA
aggaaacaatgttaggaaaaaaaattgagtgggaaacaactgaaaaggaagggggtcatctctgtacacctgtcaatcacacaatgtcattgttccactgaggctccaag

SEQ ID NO: 77943 - DNA, 110 bp, synthetic construct
  source 1..110: mol_type = other DNA
tcctggcccagaaaactccatataccatgggtgtgtctagaatcccataaattgaataagttaattacagaatattattttagctatgtagaacatttgagtgtataact

SEQ ID NO: 77944 - DNA, 110 bp, synthetic construct
  source 1..110: mol_type = other DNA
agtgtgaagagggtggattagttactaaataataataataattagacattctcaggcagaatacttataatcccaacagtgtcttgtttatttgtttgaaatgccacaac

SEQ ID NO: 77945 - DNA, 110 bp, synthetic construct
  source 1..110: mol_type = other DNA
ttgctgacgagagatgcaagctctcctttctctttaaatcatacaccttctcacatatcgtatccattcagttttttctgccttgcagtctttaaagctgtccataaata

SEQ ID NO: 77946 - DNA, 110 bp, synthetic construct
  source 1..110: mol_type = other DNA
tatcgtatccattcagttttttctgccttgcagtctttaaagctgtccataaatatttgattcttgctctcttggacctttcccactagaaggaatttattattgaccat

SEQ ID NO: 77947 - DNA, 110 bp, synthetic construct
  source 1..110: mol_type = other DNA
acctttctgaggtcatgaattccttctttactcaccttagatgctatggtacatcattataaaatttcctcaaaaatattctcaaatctcttgaccctttcctctttgtt

SEQ ID NO: 77948 - DNA, 110 bp, synthetic construct
  source 1..110: mol_type = other DNA
attataaaatttcctcaaaaatattctcaaatctcttgaccctttcctctttgttgttcttgcctaaaaagactaaatctacttaaacacctacttttctggatctgtac

SEQ ID NO: 77949 - DNA, 110 bp, synthetic construct
  source 1..110: mol_type = other DNA
tgcctcctttttgagacttcacacttttctgtccagacatcaccgtgctcagatggcaggctttcccagcaggcatgattctgaccttgaaaccactctaattggttctc

SEQ ID NO: 77950 - DNA, 110 bp, synthetic construct
  source 1..110: mol_type = other DNA
aagacattagatggaagtgcatccggggtgggtgtgtgctgaataagtccaactgagctcttaacaattttaacaacaaagatgtttcaatatttatatccgtgattaga

SEQ ID NO: 77951 - DNA, 110 bp, synthetic construct
  source 1..110: mol_type = other DNA
agtatttgtttatcgtccccaaagtcaatattttctagagttcttttgccctttggagcttccattgttcctatatttttgatactaagtccttaggagagagatgatta

SEQ ID NO: 77952 - DNA, 110 bp, synthetic construct
  source 1..110: mol_type = other DNA
taagctcaatctcatttataaactcgatcagagtgtcctttttcattcaaagattgctctttcattttattcatttacccaaatgcccactttccctattatagaaatcg

SEQ ID NO: 77953 - DNA, 110 bp, synthetic construct; identical to SEQ ID NO: 77952
  source 1..110: mol_type = other DNA

SEQ ID NO: 77954 - DNA, 110 bp, synthetic construct
  source 1..110: mol_type = other DNA
ctgctaagtgaaaaatcatttgtcacaatgttccttttgttgttttaaatggtctcatttaaccgtcttaaagtgcctctcaattttctaagtaagtttattaccttact

SEQ ID NO: 77955 - DNA, 110 bp, synthetic construct
  source 1..110: mol_type = other DNA
catttaaccgtcttaaagtgcctctcaattttctaagtaagtttattaccttactagtttggattccttgtgacctaatctcagtggtgaataatggaggctaaagggtt

SEQ ID NO: 77956 - DNA, 110 bp, synthetic construct
  source 1..110: mol_type = other DNA
gacccatgcagaaagtttaatgtataagtaacaggaattttgatgtcatatcaataattcctaaggatggaaggacacacatctctatacggtaaagacctaccaagtgc

SEQ ID NO: 77957 - DNA, 110 bp, synthetic construct
  source 1..110: mol_type = other DNA
tgcatgttcaaatggacgtggtcattaatgactaccttaatgacagtgaaagactattcaaggccttcagggcatcacctggcccaggtatgagtgtgtgtctggattgc

SEQ ID NO: 77958 - DNA, 110 bp, synthetic construct
  source 1..110: mol_type = other DNA
gtcattaagttttcttttgatcctttcctcttctacctaaagttccatccattggctgaatctagctcaaggtcaagtctctctgggtgaaacacagccatctccatcag

SEQ ID NO: 77959 - DNA, 110 bp, synthetic construct
  source 1..110: mol_type = other DNA
atccaattatatcgatctgaggtaaattttcccaatttcctaagtggtcagcacaatgataataaacattctataatacagtcagtggaaagatatgtttgggatttata

SEQ ID NO: 77960 - DNA, 110 bp, synthetic construct
  source 1..110: mol_type = other DNA
agaccaattatgacatcacgatgacattagctacaatgaattcttaatgggtcgcctccaccaggctcagaggtgcaaagctaagaaatggaacatagctaatgatgcta

SEQ ID NO: 77961 - DNA, 110 bp, synthetic construct
  source 1..110: mol_type = other DNA
caatatttacttggtggtgttccaaaagcagacatattgaaagattatttacttacttatttatttatggtcacgcctgagaaacatggaagttgacaggccagggatcg

SEQ ID NO: 77962 - DNA, 110 bp, synthetic construct; identical to SEQ ID NO: 77961
  source 1..110: mol_type = other DNA

SEQ ID NO: 77963 - DNA, 110 bp, synthetic construct
  source 1..110: mol_type = other DNA
atacagtttctaaggggcagaaattcaggagcagcgtagctggcttggggtgtcttatgatatcatgggcaagctgccagcccgggctcactcaccgagctgacaagtca

SEQ ID NO: 77964 - DNA, 110 bp, synthetic construct
  source 1..110: mol_type = other DNA
tatgatatcatgggcaagctgccagcccgggctcactcaccgagctgacaagtcagtgctggctgttggcaggacatctcagtccctcaccctaggaacctcctcatagg

SEQ ID NO: 77965 - DNA, 110 bp, synthetic construct
  source 1..110: mol_type = other DNA
agaattgtcagacccagagcaagaactctcagctgaaactaagtcacccaagacaggtccttccctaaaatttcaatatggcatatctgtcaaggtccagtcagaagaaa

SEQ ID NO: 77966 - DNA, 110 bp, synthetic construct
  source 1..110: mol_type = other DNA
gggcggatttttggtttttcgtcctgctccaccttggtcacagaatgactttgtctagtgtcagtcttcagtgaaaatgtttagcaggaaagaccatgatgaggacagga

SEQ ID NO: 77967 - DNA, 110 bp, synthetic construct
  source 1..110: mol_type = other DNA
tagtgtcagtcttcagtgaaaatgtttagcaggaaagaccatgatgaggacaggacacggtgagggcaggacaattcctaggaacaccaaggtttagttgagagtgccag

SEQ ID NO: 77968 - DNA, 110 bp, synthetic construct
  source 1..110: mol_type = other DNA
attaatgccacagttcattttagaaactaattcctttgcactcaaattcagagttttttgacaccatagatctgcttgcctccagctgtggtgatgatgtttgctgatct

SEQ ID NO: 77969 - DNA, 110 bp, synthetic construct
  source 1..110: mol_type = other DNA
ttgcactcaaattcagagttttttgacaccatagatctgcttgcctccagctgtggtgatgatgtttgctgatcttattggttaggggttgaatcagagctacagctgcc

SEQ ID NO: 77970 - DNA, 110 bp, synthetic construct
  source 1..110: mol_type = other DNA
taatgatagtacctatgtcctaggattgttgtaaggattaagtgaatttgtagctacgaagtgattagcactgtgtctggcatggttagcagtgttcagtaagttagtta

SEQ ID NO: 77971 - DNA, 110 bp, synthetic construct
  source 1..110: mol_type = other DNA
acgaagtgattagcactgtgtctggcatggttagcagtgttcagtaagttagttatttgactgcaggcgaagaaacccaactcaaactggctgaagcttaaaatgggaac

SEQ ID NO: 77972 - DNA, 110 bp, synthetic construct
  source 1..110: mol_type = other DNA
attccctgcttttatggagcttctgggtaaaagactgtcaataaacatgacaaataggtaaaatgtgcagcatataagacaataatgggtgctatggagagaatgcaaac

SEQ ID NO: 77973 - DNA, 110 bp, synthetic construct
  source 1..110: mol_type = other DNA
aggtaaaatgtgcagcatataagacaataatgggtgctatggagagaatgcaaacacacaagggaggtaagaaataagaggggctcattttaagaagggtgattaagaaa

SEQ ID NO: 77974 - DNA, 110 bp, synthetic construct
  source 1..110: mol_type = other DNA
ggtgcatccacctggcacacaagatttcccttaacggactacaaaggtgccttctggcctgggaaagaagaagggggaggagcgggaatgtatttgctcagctccctcct

SEQ ID NO: 77975 - DNA, 110 bp, synthetic construct
  source 1..110: mol_type = other DNA
ggcctgggaaagaagaagggggaggagcgggaatgtatttgctcagctccctcctgtctcctctttcccactgattaaagttcaccccatggaggagttctcttgtggtt

SEQ ID NO: 77976 - DNA, 110 bp, synthetic construct
  source 1..110: mol_type = other DNA
aaaagcaaagaaatgacaaaacctgaatgacagagatatttgaatcccagtgaacctgtttcattataatcagtataaaactctagtacaacataatttgggtagttctg

SEQ ID NO: 77977 - DNA, 110 bp, synthetic construct
  source 1..110: mol_type = other DNA
attcataggtggtgatggctctctgctcttgatgggccaccccacctggttttcatattcaaggtcatctcaaagttgcctcatggtcaccaagtggcttctgatctcca

SEQ ID NO: 77978 - DNA, 110 bp, synthetic construct
  source 1..110: mol_type = other DNA
tattcaaggtcatctcaaagttgcctcatggtcaccaagtggcttctgatctccagctttcatagtagaattccagctttcacagtggaattccatgtcataggaaggaa

SEQ ID NO: 77979 - DNA, 110 bp, synthetic construct
  source 1..110: mol_type = other DNA
catccagtgcaatcagatgatccaatcccggggcccctttccccacctggtgccggctgcttctgattagcttggggccccgctgccctgacgaacaatgggctcctctc

SEQ ID NO: 77980 - DNA, 110 bp, synthetic construct
  source 1..110: mol_type = other DNA
gctgcttctgattagcttggggccccgctgccctgacgaacaatgggctcctctcgggtccgtggaggacaggaaattaagccatcaggcaccttgcctattatttccat

SEQ ID NO: 77981 - DNA, 110 bp, synthetic construct
  source 1..110: mol_type = other DNA
atactatacagcatggaaaatagatgaaaggtacatatatcaaacatggctagatctttaaaataccatgataagaagcagtttgcattcatgtaagcttgaaagataaa

SEQ ID NO: 77982 - DNA, 110 bp, synthetic construct
  source 1..110: mol_type = other DNA
gcagttgttattcatctaaaatgctttatagttcatcccacagtgaaggcaagtcatctgagatcacacatggtctgccctgcaaagaactgcccagacctgtttggcat

SEQ ID NO: 77983 - DNA, 110 bp, synthetic construct
  source 1..110: mol_type = other DNA
tcacaacatttttaacccattgtgctttatatagttgaaggtatttatttacccatcctatttgtggctcactttctacacatagatatgcctttgcttagccattgcct

SEQ ID NO: 77984 - DNA, 110 bp, synthetic construct
  source 1..110: mol_type = other DNA
tcctatttgtggctcactttctacacatagatatgcctttgcttagccattgcctaagagctgcagtaggatagcactcatcaaaataatagtgggcagagtataaaatc

SEQ ID NO: 77985 - DNA, 110 bp, synthetic construct
  source 1..110: mol_type = other DNA
tgccctgagggtaaccatagcaacaaccaacctcctccaatccagcccagctcctaactagatcctttcaaacatccacactcagtgtttatcagtaggaaaggtacgtc

SEQ ID NO: 77986 - DNA, 110 bp, synthetic construct
  source 1..110: mol_type = other DNA
aactagatcctttcaaacatccacactcagtgtttatcagtaggaaaggtacgtccgtgtctaagcataaaaactctgcctcagtctcttctgacatacacaagatgtcc

SEQ ID NO: 77987 - DNA, 110 bp, synthetic construct
  source 1..110: mol_type = other DNA
gacttcccaaggaggcccatggtgtcatgtgcacgagcagcgcaggattaaggacaagagagctgaaagcccctggatgtgggccttacatctccagggcaccttccacc

SEQ ID NO: 77988 - DNA, 110 bp, synthetic construct
  source 1..110: mol_type = other DNA
tgagaaagcacgactctcagtgagttcccattgaggcttagctggtcatgaactcaattagtatccatgaggaggtgggttaaggatcctgtgttgccgtgatctgtggt

SEQ ID NO: 77989 - DNA, 110 bp, synthetic construct
  source 1..110: mol_type = other DNA
cacgaaccacttagataacactgaaaatgtccaggggaagctttagtccacacacagtttcttcaaaagcctcttcactggatttctcagggaaaagacccccccaaaaa

SEQ ID NO: 77990 - DNA, 110 bp, synthetic construct
  source 1..110: mol_type = other DNA
agtttcttcaaaagcctcttcactggatttctcagggaaaagacccccccaaaaaaaaaaaaaaaaaaagagagagagagacttctctaccttcctaacttatccctatt

SEQ ID NO: 77991 - DNA, 110 bp, synthetic construct
  source 1..110: mol_type = other DNA
aggcaaagaacagagacttgcaattatttgtcgtgtgggtgggaggagagagggagggctgtgtaaatggggggagaagagtggtggccgaagggaccaggtgggagcaa

SEQ ID NO: 77992 - DNA, 110 bp, synthetic construct
  source 1..110: mol_type = other DNA
agctatgacaaagggccctttggggaccttcttctccacttccatcctctgtgcagaacagccaggctcatccctccagtgctatctgctcagagcatcctctggagata

SEQ ID NO: 77993 - DNA, 110 bp, synthetic construct
  source 1..110: mol_type = other DNA
actctctacccttatggagggtcaggaggctgtcttgggcctaaagttctaggagaacagatagttattttactgcaagatccaagaatctccacccaagatctaattgc

SEQ ID NO: 77994 - DNA, 110 bp, synthetic construct
  source 1..110: mol_type = other DNA
tgccctgagaattctaagggataggatgagggttcaggtcaatagtctaccccatggtgtctgacaggtggaaagacaggaagtagagatgaaacttgtcttctcaaagg

SEQ ID NO: 77995 - DNA, 110 bp, synthetic construct
  source 1..110: mol_type = other DNA
gaaggtctcagtaaaatcaaacctgcactcttaaaaactacattcgcgtacgactgagattctgctgtacaagagaaattgatacaacattgtaaatcaactatatttta

SEQ ID NO: 77996 - DNA, 110 bp, synthetic construct; identical to SEQ ID NO: 77995
  source 1..110: mol_type = other DNA

SEQ ID NO: 77997 - DNA, 110 bp, synthetic construct
  source 1..110: mol_type = other DNA
ttttactatcacctttttgtctgcttacattaaatacaataacccctacacccaccccaaataataaatcagagaactctaaaagatttatagagcacctatccaggctt

SEQ ID NO: 77998 - DNA, 110 bp, synthetic construct
  source 1..110: mol_type = other DNA
ctacacccaccccaaataataaatcagagaactctaaaagatttatagagcacctatccaggcttatgtcactgatggatttccttaatgtataactattacatataaaa

SEQ ID NO: 77999 - DNA, 110 bp, synthetic construct
  source 1..110: mol_type = other DNA
attatgcccccccttttttcttctttttgggccaccaaaaagaagcatatgcaatttctcaggccagggatggaatccgagctggaactgtggcctatgcctcagctaca

SEQ ID NO: 78000 - DNA, 110 bp, synthetic construct
  source 1..110: mol_type = other DNA
ttctcaggccagggatggaatccgagctggaactgtggcctatgcctcagctacagcagtgctggatccttaactcactgcaccaggtgggctggggatcaaactggagc

SEQ ID NO: 78001 - DNA, 110 bp, synthetic construct
  source 1..110: mol_type = other DNA
cataactgagaagacactcacaaagcatctgggaaaggatgttgctcacacatgaacaaaattctcatttattctcaaatacttgtgcagggctgatttcagagtgtagg

SEQ ID NO: 78002 - DNA, 110 bp, synthetic construct
  source 1..110: mol_type = other DNA
agacgagataggaactgagcaaacaccggatgagatgaatttttgatcaccgctcaggcactgtgaatatttctgcctgccttgccccgtgtttttctcccccagctcaa

SEQ ID NO: 78003 - DNA, 110 bp, synthetic construct
  source 1..110: mol_type = other DNA
aggcactgtgaatatttctgcctgccttgccccgtgtttttctcccccagctcaagcaggagtataccctccgcgggtcctcaggagagagcctggtgggcagggccttt

SEQ ID NO: 78004 - DNA, 110 bp, synthetic construct
  source 1..110: mol_type = other DNA
aagaaaatagcaaaaagaccaaaaaaaagaaaaaaagaaaaaaagaaaatgggagctcctgccagcaggtgttgcaggcagcgttcccaggctgcagcctggcccatcgt

SEQ ID NO: 78005 - DNA, 110 bp, synthetic construct
  source 1..110: mol_type = other DNA
ctcctgccagcaggtgttgcaggcagcgttcccaggctgcagcctggcccatcgtccacccccgcattaggttctgaggggattagcatcccacccttctcaggggggat

SEQ ID NO: 78006 - DNA, 110 bp, synthetic construct
  source 1..110: mol_type = other DNA
ccacgatgggaattcctgggctgcacctttaaattgggtgaccagggagggcctcacctagaaggtgacatttgggagttcttgttgtggctcagtggaatctgactagc

SEQ ID NO: 78007 - DNA, 110 bp, synthetic construct
  source 1..110: mol_type = other DNA
ggagggcctcacctagaaggtgacatttgggagttcttgttgtggctcagtggaatctgactagcctccatgagggtgtaggttcgatctctggcctcactcagtgcgtt

SEQ ID NO: 78008 - DNA, 110 bp, synthetic construct
  source 1..110: mol_type = other DNA
ggcctgtcttgcgtttaccctgctgggactccagctttccacatgcggtggataagaaacagaaaatggggagtttctattgtggcgcagcagaaacaaatccaactagg

SEQ ID NO: 78009 - DNA, 110 bp, synthetic construct
  source 1..110: mol_type = other DNA
cattttcaagcaaccctgttcaaaaggccacagaaactggttttccgacatgatgtagaattcatatggactttctgtgcttggtagtttcacagaagtacattcagctt

SEQ ID NO: 78010 - DNA, 110 bp, synthetic construct
  source 1..110: mol_type = other DNA
ttgtcgttgggcatgtcatctaaaacagttagagtagtagatgatttggagacccatctagcttagaagctaatcaggaaaatgtttcagtaaatgaaaaaccataagag

SEQ ID NO: 78011 - DNA, 110 bp, synthetic construct
  source 1..110: mol_type = other DNA
taccccataccattgtcatgaggattaaatgaaatagttcatgtgagggccggccactcagaaaagctctcgagaaaagtgtttaaacacatacacacacacacaacaaa

SEQ ID NO: 78012 - DNA, 110 bp, synthetic construct
  source 1..110: mol_type = other DNA
actcagaaaagctctcgagaaaagtgtttaaacacatacacacacacacaacaaagaaccttagcagtagttgcctggcaatgtttttctcttttatttctcttggctca

SEQ ID NO: 78013 - DNA, 110 bp, synthetic construct
  source 1..110: mol_type = other DNA
tgttggtggaaacgtaagatgctacaactacttgggaaaacagttgggcagtttctcagaagtttaaatgtatacctgttgaatcactcaaccacttcactcctaaggat

SEQ ID NO: 78014 - DNA, 110 bp, synthetic construct
  source 1..110: mol_type = other DNA
gttcataaaatggaaacattactatccccatttcatacaggaggaaacaggtgttgaaagtttaagtaactttccaaagtcatatagtaaagagaggacccagcaataaa

SEQ ID NO: 78015 - DNA, 110 bp, synthetic construct
  source 1..110: mol_type = other DNA
gaaagtttaagtaactttccaaagtcatatagtaaagagaggacccagcaataaatctatacacagttgttgtttttttttttcctgctaccactttatgttgtctcttg

SEQ ID NO: 78016 - DNA, 110 bp, synthetic construct
  source 1..110: mol_type = other DNA
ggatggctgtagctcagctcccctgggcctggggattccaaggagacttctaagtaatgagagatgcagaaatttggcagaggcaagattacccaaagatctgcctggcc

SEQ ID NO: 78017 - DNA, 110 bp, synthetic construct
  source 1..110: mol_type = other DNA
aatgagagatgcagaaatttggcagaggcaagattacccaaagatctgcctggccgtcacctttcaagctccatgtgggggatgaaatgtccaaagtttaaagtcatacc

SEQ ID NO: 78018 - DNA, 110 bp, synthetic construct
  source 1..110: mol_type = other DNA
tccattgactttttaagtggttttgtgttgggaaacttgcggagtttattagttccactacacctgcgtgggccattaaggaccaaggtgtgataacacagccagttgct

SEQ ID NO: 78019 - DNA, 110 bp, synthetic construct; identical to SEQ ID NO: 78018
  source 1..110: mol_type = other DNA

SEQ ID NO: 78020 - DNA, 110 bp, synthetic construct
  source 1..110: mol_type = other DNA
tttttagcacgctttctcacagatggctttcgtgttacagtaaaaccagtatgatgtattcatgtttgcaccttgacctccactccttcaacaagcatggtcaggagcct

SEQ ID NO: 78021 - DNA, 110 bp, synthetic construct
  source 1..110: mol_type = other DNA
gtattcatgtttgcaccttgacctccactccttcaacaagcatggtcaggagcctccagtgtgccaggcccagggctagttgcagagggccagctcctccagggtcccgc

SEQ ID NO: 78022 - DNA, 110 bp, synthetic construct
  source 1..110: mol_type = other DNA
ggtgccaagtgccaggctgagaaacgtcttcctctggctacttgatcatggattgttttaggtgtgaccatgctcttccggccacactttaagagccctttgcttctcaa

SEQ ID NO: 78023 - DNA, 110 bp, synthetic construct
  source 1..110: mol_type = other DNA
gacccagacgcctctggccacacagagagggtttcctttgaggactgacctgtgagagctttcgggggctgcagagaaagaactagaagcctggtacggagacctgagtg

SEQ ID NO: 78024 - DNA, 110 bp, synthetic construct
  source 1..110: mol_type = other DNA
aatgattctgtggacttgagtcactttgcagtgctggcattcatcctcaggcacaggcatcgcttgagacggccctgttggacttgtgattaaggcaatccagtcatgca

SEQ ID NO: 78025 - DNA, 110 bp, synthetic construct
  source 1..110: mol_type = other DNA
ggcatcgcttgagacggccctgttggacttgtgattaaggcaatccagtcatgcagtcagcagccttgtcaaacgctcaagcaagtgccttcccccttgaagcctcagtt

SEQ ID NO: 78026 - DNA, 110 bp, synthetic construct
  source 1..110: mol_type = other DNA
tgattcctgaaagccttttttcacctctgaatgtaagaaagaggcagtaagaagatcattgatttgagctgcacttttactataacatttatttaacacgctttttactg

SEQ ID NO: 78027 - DNA, 110 bp, synthetic construct
  source 1..110: mol_type = other DNA
tttaatgagagtagttgccagtccttgaacgaggcggttcaggaccattatatgtaattgggcaagctaagcattacccccactttacagataaggaaactgagtcagag

SEQ ID NO: 78028 - DNA, 110 bp, synthetic construct
  source 1..110: mol_type = other DNA
acaggaccccacggggacaggggatgcccacttcattcttccaccgagttcccagcactggaaaaacactcaataatccctgttgagaaatgaatgctttgaacacatga

SEQ ID NO: 78029 - DNA, 110 bp, synthetic construct
  source 1..110: mol_type = other DNA
cactggaaaaacactcaataatccctgttgagaaatgaatgctttgaacacatgacatgacctctgacccccagtagaattttctttctggcagaaaccctcagaaaagc

SEQ ID NO: 78030 - DNA, 110 bp, synthetic construct
  source 1..110: mol_type = other DNA
agcgaggcgagggattgtatcctcatgagtactagccgggttcttaaccagctgagccacaacaactcccttgtatagctttttggttttgtttttatttttatttattt

SEQ ID NO: 78031 - DNA, 110 bp, synthetic construct
  source 1..110: mol_type = other DNA
acaaccagacctgatttcctagtctcacttgacccttcctggctgggagctctatgccagccctcaatctgctaagcgtcatgtctgcatctgtgacccagacttactaa

SEQ ID NO: 78032 - DNA, 110 bp, synthetic construct
  source 1..110: mol_type = other DNA
ggcaggatggaaatttctataaaatgtccaaaagtgctgttcattgactcactggaaaagttaaacctacttcgtcccaggactcgcccaggccaccaggtgttctagtt

SEQ ID NO: 78033 - DNA, 110 bp, synthetic construct
  source 1..110: mol_type = other DNA
gctacccacatgccacatcagacctccacatcaccacactggtgtcaaggccattaggaagcagaaccttctaacctttaggctccctgaaggtcaaacagcggcaggct

SEQ ID NO: 78034 - DNA, 110 bp, synthetic construct
  source 1..110: mol_type = other DNA
gtcatcaggaaatgacaggtgctcctggccccacctggatcaggtgtgcttgtaatggtctctggtatgatgtctgagctgcaagaccacagatcatagaggacacagcc

SEQ ID NO: 78035 - DNA, 110 bp, synthetic construct
  source 1..110: mol_type = other DNA
gccatagttctgctcactgcagtctttgcacatggcttctctgtcttcctcattttctctctttggctaagtcttcctcacttattaagtgtcagctcatgatttgtctc

SEQ ID NO: 78036 - DNA, 110 bp, synthetic construct
  source 1..110: mol_type = other DNA
tctctctttggctaagtcttcctcacttattaagtgtcagctcatgatttgtctcctctctatgttatcctgtgcttgctgccatcctgccctgttccattctcctgttt

SEQ ID NO: 78037 - DNA, 110 bp, synthetic construct
  source 1..110: mol_type = other DNA
gtttggcagagtcttaaaagccagcagaggaagaggaagctgggtaggagttacgagtgaaggcgtcacctgtgccctgatgcgaagctgttggcctggggatgctggac

SEQ ID NO: 78038 - DNA, 110 bp, synthetic construct
  source 1..110: mol_type = other DNA
gccgggtgacaccagtggcacaccaggcacgtgcctagggccacagggggacatgcacacacaaagttcaagttcagagggcttattagacatgtgcagtcagaaaaccc

SEQ ID NO: 78039 - DNA, 110 bp, synthetic construct
  source 1..110: mol_type = other DNA
tttgttgaatggacaaatgagcaaatctctaggttttccaccagagtggggatggggccccagtgtgaccctacagagctggtctcagattgtgcctgggtacctggccg

SEQ ID NO: 78040 - DNA, 110 bp, synthetic construct
  source 1..110: mol_type = other DNA
ggccccagtgtgaccctacagagctggtctcagattgtgcctgggtacctggccgtgtccaggtgtgtatgctgatggggaaggtgtctacctggccatctccagagacc

SEQ ID NO: 78041 - DNA, 110 bp, synthetic construct; identical to SEQ ID NO: 78039
  source 1..110: mol_type = other DNA

SEQ ID NO: 78042 - DNA, 110 bp, synthetic construct; identical to SEQ ID NO: 78040
  source 1..110: mol_type = other DNA

SEQ ID NO: 78043 - DNA, 110 bp, synthetic construct
  source 1..110: mol_type = other DNA
gacttgtcaccaactgtggtccctgaccttccgtgcctccgggtcttttcccatgtgctcatcatggtccctagagaagggccttccaccctctgcccgagggggtgggg

SEQ ID NO: 78044 - DNA, 110 bp, synthetic construct
  source 1..110: mol_type = other DNA
ccctttgctgtacccccatccatgtgggtttggtgaacacttccttactttccggtcctgtaagatgctccagactccagctgaatagtccctgtcccagccctaggttg

SEQ ID NO: 78045 - DNA, 110 bp, synthetic construct
  source 1..110: mol_type = other DNA
tcctgtaagatgctccagactccagctgaatagtccctgtcccagccctaggttgtcccagcccttttgtgcagggttgtattagaagccaaggcttgaggagtttgcat

SEQ ID NO: 78046 - DNA, 110 bp, synthetic construct
  source 1..110: mol_type = other DNA
tgttcctacccatacccacctctgtctccttctttctggtaaactcacaggtgtgcgtggatttctcttagctcccacccagtactgtgggttcattctgcctcttctgt

SEQ ID NO: 78047 - DNA, 110 bp, synthetic construct
  source 1..110: mol_type = other DNA
cgggatgccctgccagggagtgtccacctggaaaacgcccgacctcagctcccagtgttgcctctgctccgaaggagaagtggccccaatagatgtaggtattactcaaa

SEQ ID NO: 78048 - DNA, 110 bp, synthetic construct
  source 1..110: mol_type = other DNA
cccagacccctgaccccgataggtataaatccttccagtcccccatcagagactggcagactgtccagggaatttattaccaagaggtaatccacttggctgtgcttcag

SEQ ID NO: 78049 - DNA, 110 bp, synthetic construct
  source 1..110: mol_type = other DNA
taatcttgtcttttgcagtcttggcatataaatgaccacttcgatataaaaggtggttttttaggtcagctcttctggatgtttcacatggacaatcatgttgaaaaagg

SEQ ID NO: 78050 - DNA, 110 bp, synthetic construct
  source 1..110: mol_type = other DNA
gcggggggactcagtgaggccaaggtgggggaggtcctttggagccaccaaaggcccctggagagcacggggctgctgtggcatggactccacacagcaagacagacctg

SEQ ID NO: 78051 - DNA, 110 bp, synthetic construct
  source 1..110: mol_type = other DNA
ccctggagagcacggggctgctgtggcatggactccacacagcaagacagacctgttcacagagcctctggcccatggccggaggtccaaggtctgcggcaggaagggcc

SEQ ID NO: 78052 - DNA, 110 bp, synthetic construct
  source 1..110: mol_type = other DNA
gggtgccaggggcactggggtgggacaggcgctcttcttcctagcgtgccctttggcctgatgacaggaagaagtgaattccctcagccatctgtgttcctttggttgct

SEQ ID NO: 78053 - DNA, 110 bp, synthetic construct
  source 1..110: mol_type = other DNA
ctgcctctccccagcccccactctgactcccccagcccccgtctctgataaccctcaccccaggtccctgtccctccccctcaagtcatcgacgtcaccatctcatctca

SEQ ID NO: 78054 - DNA, 110 bp, synthetic construct
  source 1..110: mol_type = other DNA
caccccaggtccctgtccctccccctcaagtcatcgacgtcaccatctcatctcattttgagttcgttttacgaaacaaaaaattttaaaaagacaaaaaaaatgaactg

SEQ ID NO: 78055 - DNA, 110 bp, synthetic construct
  source 1..110: mol_type = other DNA
actctcaacaactctatgccaacaagttaggcagctgaagaaatggatagatttttaaaatggcacaaatcaccacaattctctccagaaaaaatgaaaattaagtattc

SEQ ID NO: 78056 - DNA, 110 bp, synthetic construct
  source 1..110: mol_type = other DNA
ctctcttcagtggagtcaaacacaccacggggcaggaagaaggttctgcgtgtctctggccggcagaccccatcaccaagcgtgtcccagcccaggaactccccagacac

SEQ ID NO: 78057 - DNA, 110 bp, synthetic construct
  source 1..110: mol_type = other DNA
gaagaaggttctgcgtgtctctggccggcagaccccatcaccaagcgtgtcccagcccaggaactccccagacacacggggatgtggctgcccgcccacctgcctgcctg

SEQ ID NO: 78058 - DNA, 110 bp, synthetic construct
  source 1..110: mol_type = other DNA
ctatttcctagctccacgcctcagtttcctccgctgtaaaacagcaagctgtcttggacgcttctggcaagaatcaggcatgacacgcgtgtgccacctgtgatcgctaa

SEQ ID NO: 78059 - DNA, 110 bp, synthetic construct
  source 1..110: mol_type = other DNA
ggacgcttctggcaagaatcaggcatgacacgcgtgtgccacctgtgatcgctaaaggctgagccctgcctcccccccagatgagggcccagccaggccccctgagcctc

SEQ ID NO: 78060 - DNA, 110 bp, synthetic construct
  source 1..110: mol_type = other DNA
agacggaaagctacaagccaaccctgcgatgtgagttggctatttcggtatccctgtctccgtaattgatagagcaattaataggcaggaaggcagcgggcagaaaatct

SEQ ID NO: 78061 - DNA, 110 bp, synthetic construct
  source 1..110: mol_type = other DNA
cccttgtgctgctccgccgccgccgtgatcagcaggacgcaccaggactcaccacggtgggcggtgcacctgctgctgttactgacaatgtcaaggcttgctcagattac

SEQ ID NO: 78062 - DNA, 110 bp, synthetic construct
  source 1..110: mol_type = other DNA
ggtgggcggtgcacctgctgctgttactgacaatgtcaaggcttgctcagattacagtgttggaaccccgcaatctctgtggcttagtccgtgatgctgggcagggccat

SEQ ID NO: 78063 - DNA, 110 bp, synthetic construct
  source 1..110: mol_type = other DNA
cgaggaagaggctgatgaagtagctgctgggttccaatattcaactcccaaggcgccttctttgtctgagaaggaaaaacacactggtcaccacaataaggtgaactggt

SEQ ID NO: 78064 - DNA, 110 bp, synthetic construct
  source 1..110: mol_type = other DNA
atccaattcggtgcacctgaggtccataaataaaagaataaatattgacataaaagagtgacagaaagagtgagtggacccacgaacgactgattagaaatggaaatgcc

SEQ ID NO: 78065 - DNA, 110 bp, synthetic construct
  source 1..110: mol_type = other DNA
ataattatgaattctcttgtattcatcgatgttatttttaaaaaagcaaatgcgtttctttgatgatttttgtgagtagtaagcaaatgaatagagggagggcctcagca

SEQ ID NO: 78066 - DNA, 110 bp, synthetic construct
  source 1..110: mol_type = other DNA
tttctctcatagatgcccacagcctagtccagtgtggcctcatcttaaattggttacatctgcaaagactttatttccaaatagattcacatttacagattccaggttta

SEQ ID NO: 78067 - DNA, 110 bp, synthetic construct
  source 1..110: mol_type = other DNA
ccgccttctcgcaatgttgttcaaggaaatgctttacaaagaaggaaaggggttcaggtcagcaactcagatctacatgaagaaggaagagcctcagagaggaataaata

SEQ ID NO: 78068 - DNA, 110 bp, synthetic construct
  source 1..110: mol_type = other DNA
agcccccagcagagctgtgtcctgggcagagtctgagagaaacaaaggtgccctcaccagcccacaagccccgcccagccccattcaggctgcatcaagagagacagaga

SEQ ID NO: 78069 - DNA, 110 bp, synthetic construct
  source 1..110: mol_type = other DNA
accagcccacaagccccgcccagccccattcaggctgcatcaagagagacagagacatagacagagacagagagaaacaaagagagagacagagacagagagagagacag

SEQ ID NO: 78070 - DNA, 110 bp, synthetic construct
  source 1..110: mol_type = other DNA
ccactgcacacacagctgccctcctcagacatccaggccccgggctggggcggggggtggggaggtggggggctcccatgtgaaatagacaaggttggccacagtcccag

SEQ ID NO: 78071 - DNA, 110 bp, synthetic construct
  source 1..110: mol_type = other DNA
tgacagcccctccctttgtcacgctggcacttggaagtgtgaactgcaagcacaacaaacacactgggagaccaaaatgtggagacgcttagaggagcagcaacacgtgc

SEQ ID NO: 78072 - DNA, 110 bp, synthetic construct
  source 1..110: mol_type = other DNA
aaatgggttaaatttatcaggcttgtatgtttttcgtcatttttaagaaaccctccttactctggtgggattaaatgccctctacacttcactactttctcctaagaaac

SEQ ID NO: 78073 - DNA, 110 bp, synthetic construct; identical to SEQ ID NO: 78072
  source 1..110: mol_type = other DNA

SEQ ID NO: 78074 - DNA, 110 bp, synthetic construct
  source 1..110: mol_type = other DNA
tttacaacaagctgtcacgtcctcccaagatgtgctcgtgtgacagcaactacctttgaagaacgaaaaccatgtcttaggtgaggcaagtcacattcaccaggcccccc

SEQ ID NO: 78075 - DNA, 110 bp, synthetic construct
  source 1..110: mol_type = other DNA
ttgaagaacgaaaaccatgtcttaggtgaggcaagtcacattcaccaggcccccccacctcatcaagacaagaggactttttctgttctggcagcagctgcagcatgcgg

SEQ ID NO: 78076 - DNA, 110 bp, synthetic construct
  source 1..110: mol_type = other DNA
aggtaagtgtgactgaggcagatcaactccccgcccaaggccctggttaagggaagatcccaggaagttcccgccccagcctgaaaccccatcagcagccggctaggccc

SEQ ID NO: 78077 - DNA, 110 bp, synthetic construct
  source 1..110: mol_type = other DNA
cgcatggtgacccagcgtggtgacccagtgtgccaggagagccagggccaggcggagagcaccaatgggcagggcacccaggtctttccagagtcagctctaggcaccat

SEQ ID NO: 78078 - DNA, 110 bp, synthetic construct
  source 1..110: mol_type = other DNA
agagcaccaatgggcagggcacccaggtctttccagagtcagctctaggcaccatcgaggcacaggcacccagacacgtgtgcttgagggcctagcgatggcgggtgact

SEQ ID NO: 78079 - DNA, 110 bp, synthetic construct
  source 1..110: mol_type = other DNA
acactggattgatagctttgctgggtatgtaatttgcattgggaataatttttatcaaaaatctgaacgtgagcgtttccactgtggtgcagtgagttaagaatctgact

SEQ ID NO: 78080 - DNA, 110 bp, synthetic construct
  source 1..110: mol_type = other DNA
gcctgggaacctccacatgccacaggagcggccctagaaagaaaccaaaccaaaccaaaccaaaccggaaactcctcttgtgatgtagtcagtttctctgattgggggaa

SEQ ID NO: 78081 - DNA, 110 bp, synthetic construct
  source 1..110: mol_type = other DNA
ggtctcggtcagttatgcgaagcggaaacaaaacgagaactgcccgagagcctagggacgccttgcgtgcgggccgcaggctcgtgtccgatgcagcgaggactccggac

SEQ ID NO: 78082 - DNA, 110 bp, synthetic construct
  source 1..110: mol_type = other DNA
tcagataaggaggagtccctatgctttgagaaggtaaaataataccagaagctgacagaaaatcataaaggcacatggaaaagggcggccacagcggcaggtccctgtgt

SEQ ID NO: 78083 - DNA, 110 bp, synthetic construct
  source 1..110: mol_type = other DNA
gcaggtttggtccccagtccggtgcagtgggttaaatgatctggtattttggattcaatcctcggcccaacaacttccacatgccttgggtgtggccataaaaacaaacg

SEQ ID NO: 78084 - DNA, 110 bp, synthetic construct
  source 1..110: mol_type = other DNA
tgagtgaattgtttgctctgttagaaggtgaggagtgaaacggaaaaggcagaccaagagaaggaggttcagggagttccctggtggtctaggatccggcattgccgctg

SEQ ID NO: 78085 - DNA, 110 bp, synthetic construct
  source 1..110: mol_type = other DNA
agtcctcaatgaggcctcctgacgactgtgagctgccccccgaggcacagccgagctgatttccatcctaagacaggactaataacgcaaagaatgtcctgtaagacaaa

SEQ ID NO: 78086 - DNA, 110 bp, synthetic construct
  source 1..110: mol_type = other DNA
ctgatttccatcctaagacaggactaataacgcaaagaatgtcctgtaagacaaagcggctaacacacagcgttttctaagccaattacagaagccggctctccacacct

SEQ ID NO: 78087 - DNA, 110 bp, synthetic construct
  source 1..110: mol_type = other DNA
atacaaatcacactaaagtcaaagcactggtgagagctgtcctgcagaaatgccgagtccctgagatccaacctctaaaatgaaccacaggcaatggagacttgatattc

SEQ ID NO: 78088 - DNA, 110 bp, synthetic construct
  source 1..110: mol_type = other DNA
ccaccgctggaggacccagccaagcgtgatggcccctcgctgggcatccggcctgtcgcagagcttggggacgatgaaatgactttctgaggaaggcctgggcagggctg

SEQ ID NO: 78089 - DNA, 110 bp, synthetic construct
  source 1..110: mol_type = other DNA
ccgcagaaaggacaaagctagacctggacaggatgaggttccgccttccagacgagggagccatcctgctggcctcgagctatggaaggttccagatgatgaggggcgtc

SEQ ID NO: 78090 - DNA, 110 bp, synthetic construct
  source 1..110: mol_type = other DNA
gggagccatcctgctggcctcgagctatggaaggttccagatgatgaggggcgtctagacagggaagagcaagctttttaaaaaatgctaactttcccaagaaaggttaa

SEQ ID NO: 78091 - DNA, 110 bp, synthetic construct
  source 1..110: mol_type = other DNA
gtcagggtctgcagcaaatccctataagggtcaagacagagaacaggggtgtgtgtggacaaggcccccagagcccccagcagagaagccgccgggcggccgccacctgc

SEQ ID NO: 78092 - DNA, 110 bp, synthetic construct
  source 1..110: mol_type = other DNA
taccgctgagccacaacgggaattccagaaacctaggttttattgtaggtcttggtggagctcccgggtggctcagcaggttaaggatctggagttgtcactgctgtggc

SEQ ID NO: 78093 - DNA, 110 bp, synthetic construct
  source 1..110: mol_type = other DNA
actattccactcctcctaaccagccgctctccagaaactgccacagtctgcaatgtctattctacttctgcgtgatctgttcagctcagtggaaaacccattccttctcg

SEQ ID NO: 78094 - DNA, 110 bp, synthetic construct
  source 1..110: mol_type = other DNA
gagtcgcagtggcaactcatatttttctttattgctaagggctggttggtggcctcaaagttccatttaagaagcttcgaaagttactgacaatttttaatgcttcatgc

SEQ ID NO: 78095 - DNA, 110 bp, synthetic construct
  source 1..110: mol_type = other DNA
gtctctcatgtcttgttcggtcacagtggagccatggccaccacggggtctttcctccccgagacagtttcccctttcggatcagttactgtgtgtcacacttgatttct

SEQ ID NO: 78096 - DNA, 110 bp, synthetic construct
  source 1..110: mol_type = other DNA
ccctgggaaggctgtgcccggcttccctgctcacctgctgcccaggtgtgcctttcctcaggatctccaggacggttcctctaaggtgcaggaagcccttcttaggctcg

SEQ ID NO: 78097 - DNA, 110 bp, synthetic construct
  source 1..110: mol_type = other DNA
gagggaggggtctcgcctgccctgcttttccgtggcgttttgtcggcgtgagcatctgatggtgtgggtgacctgtggtctttagaggatctcgggcaagcgcggtgact

SEQ ID NO: 78098 - DNA, 110 bp, synthetic construct
  source 1..110: mol_type = other DNA
aatggtgggtccctggtcatgtgccgctgccatatctcctttgtcctaaagaaggtccttcagtcctaggcagttatgtgggctttcatgtccacaaaccagacaccttg

SEQ ID NO: 78099 - DNA, 110 bp, synthetic construct
  source 1..110: mol_type = other DNA
tccttcagtcctaggcagttatgtgggctttcatgtccacaaaccagacaccttgtgagctcttgacagtggttccggcttaagtgttgcaggcagaaaaggcaaaccca

SEQ ID NO: 78100 - DNA, 110 bp, synthetic construct
  source 1..110: mol_type = other DNA
tgaacacttgactagaccgttcctatctatttctagccagaacgtcaggctgcgaggccaaggtaccagggttttcctagacacacagtataacatacttgggaaagaat

SEQ ID NO: 78101 - DNA, 110 bp, synthetic construct
  source 1..110: mol_type = other DNA
tttaccagtgatttatatacttctctggaatccccaatgatgaagttattttgtgtatttatcggtcaattccgtgggccccattttctccttgtccttagaatgtactt

SEQ ID NO: 78102 - DNA, 110 bp, synthetic construct
  source 1..110: mol_type = other DNA
agatgtggctcggatctagtggtgctgtggctctggtgtaggctggcagctgcggctccgattccagctgtaaacgtgggtcgttgctgaatcaccgcagccgtgtatgc

SEQ ID NO: 78103 - DNA, 110 bp, synthetic construct
  source 1..110: mol_type = other DNA
ctccgattccagctgtaaacgtgggtcgttgctgaatcaccgcagccgtgtatgctatgggccattttcaaggctgatcgtagcaacctcaaaatgtattttcctgactt

SEQ ID NO: 78104 - DNA, 110 bp, synthetic construct
  source 1..110: mol_type = other DNA
attctccttccgggaacctaaactgtaagctgcacttgtacaaaggtgttcacagcagcggcgtttgcagtggagaagagtggcaactaccgtggtgcagagggcggaaa

SEQ ID NO: 78105 - DNA, 110 bp, synthetic construct
  source 1..110: mol_type = other DNA
gggcatcatcagctgagaggtgacgtgggttctgtgagatgttggcggtggcaagctgggaagtgaagcattgtgaaggtagaaccgacagaacttggtcatcgctgtct

SEQ ID NO: 78106 - DNA, 110 bp, synthetic construct
  source 1..110: mol_type = other DNA
caacactgagtcctcaaccactaggccaccagggaactccagtctgtcctctcttcttggtgggcaagtcattggcagtaccattttgcaggagagggttcccatgggtg

SEQ ID NO: 78107 - DNA, 110 bp, synthetic construct
  source 1..110: mol_type = other DNA
cttggtgggcaagtcattggcagtaccattttgcaggagagggttcccatgggtgagaatggggcccagaaatcttttccatcttaagaagccgcgtctgacgtggactt

SEQ ID NO: 78108 - DNA, 110 bp, synthetic construct
  source 1..110: mol_type = other DNA
ttggacgggcacagaagcgtcttggctgatactaccctgtgttttgaaacgttgtggttaaaagtctcttttcactcaaattacggctgtgtttatggtgcctggaatta

SEQ ID NO: 78109 - DNA, 110 bp, synthetic construct
  source 1..110: mol_type = other DNA
tgagcagtaaccatctccagggtttgaaaagaagccagctgccgtctcaggaatgctttcagagcttcccttgctccttctagaagacgcagtctgtccagcaccaagtc

SEQ ID NO: 78110 - DNA, 110 bp, synthetic construct
  source 1..110: mol_type = other DNA
ccccccacccccaggagaggcttttagtatttctccccgatggctttttgtatattgaggtgaaggctaaggaagctggcggtggcctggttccacggagcgcgtcctgt

SEQ ID NO: 78111 - DNA, 110 bp, synthetic construct
  source 1..110: mol_type = other DNA
cctgtcaactaaaaaaaattacacacaacctaagagctgagagctatattttattcagtggacaaagctgaagacttaagcccaggacacggtgtccggcataactctga

SEQ ID NO: 78112 - DNA, 110 bp, synthetic construct
  source 1..110: mol_type = other DNA
tttcccagcccgggtccctcgtgggctcctgctcgccctgctctgctccgctctggatcgatggctgttggcctcttcttgctcctccgtcgtaggggctggctgctggt

SEQ ID NO: 78113 - DNA, 110 bp, synthetic construct
  source 1..110: mol_type = other DNA
tttctccaggctgtggtatccacaggtggtggataatcggaggtttttcctcacccactttggcatttgggccattcaagagtagggctgggggagttcctgttgcggcg

SEQ ID NO: 78114 - DNA, 110 bp, synthetic construct
  source 1..110: mol_type = other DNA
atcggaggtttttcctcacccactttggcatttgggccattcaagagtagggctgggggagttcctgttgcggcgcagcagaaacgaatctggctagtatccatgaggat

SEQ ID NO: 78115 - DNA, 110 bp, synthetic construct
  source 1..110: mol_type = other DNA
acgtcggccggcacgggcttgtgggttagggaccgctaatgccttgggctccctcacagctttgctcttgaagatctgtaggcgccactgtgttaaacgctgagaaggct

SEQ ID NO: 78116 - DNA, 110 bp, synthetic construct
  source 1..110: mol_type = other DNA
gtgagcggctctggcccgtgtccagggtccccacgtatccctcaaatcatccacctctcgccaaccaccactacgcctccgctcacccgccgggccgtacacccatcgcc

SEQ ID NO: 78117 - DNA, 110 bp, synthetic construct
  source 1..110: mol_type = other DNA
tctcgccaaccaccactacgcctccgctcacccgccgggccgtacacccatcgccctctccatctgccacccacctgcctgtccaaccatcacccctgtgccccacgtgc

SEQ ID NO: 78118 - DNA, 110 bp, synthetic construct
  source 1..110: mol_type = other DNA
ctcaggtgcctggagcttcctgccaagtgtcaggactggggtaaccagagagctcccctcacctccccgggggccacatgcacccacctgtcccctcctggtcctgggcc

SEQ ID NO: 78119 - DNA, 110 bp, synthetic construct
  source 1..110: mol_type = other DNA
cagggtgtcctttctcccgtccagaccgtacttggccaggatgactaggagggagcagggcagggtcaaggctggggtctgggggccgccccccgccccggtttcctggc

SEQ ID NO: 78120 - DNA, 110 bp, synthetic construct
  source 1..110: mol_type = other DNA
gtatccagaagccaggccgggcaggggtgggggcccagtggatagtggtttggtggtttacggcgtggcctctcccatcaagatcagagccctcatgcgggcgagggcgg

SEQ ID NO: 78121 - DNA, 110 bp, synthetic construct
  source 1..110: mol_type = other DNA
gtttacggcgtggcctctcccatcaagatcagagccctcatgcgggcgagggcggggactgcgttgcttccaggcttgagttgtcttgggatgctgtgtggggcggccgc

SEQ ID NO: 78122 - DNA, 110 bp, synthetic construct
  source 1..110: mol_type = other DNA
aggaccaccaggattctcctccccaaacccagccctagtgccgtcactgccccagctccgcatccttcagtggctccccactgctttgcaaactaagaagcccatccttc

SEQ ID NO: 78123 - DNA, 110 bp, synthetic construct
  source 1..110: mol_type = other DNA
ctccgcatccttcagtggctccccactgctttgcaaactaagaagcccatccttcagcttgcagccacagacctttgcaatggaactgcatcctggttctcgccctccag

SEQ ID NO: 78124 - DNA, 110 bp, synthetic construct
  source 1..110: mol_type = other DNA
tcccagggcacccgaagggcccacctggagtggggtgagaaaggatttcagatatggggcagattgaaactcatgttcagcattccccagggacctgagcaaaatccacg

SEQ ID NO: 78125 - DNA, 110 bp, synthetic construct
  source 1..110: mol_type = other DNA
ggggcagattgaaactcatgttcagcattccccagggacctgagcaaaatccacgcccccaggcatgcacaggtgtacacacaggcccagccatgccccgaggtctgtgc

SEQ ID NO: 78126 - DNA, 110 bp, synthetic construct
  source 1..110: mol_type = other DNA
ctcctgttaacagctgttcctttttattttttcaaattttactagtacctcagagttcccaccgtggcacagggattaagaatccacctgcagcagcttgggttgctgca

SEQ ID NO: 78127 - DNA, 110 bp, synthetic construct
  source 1..110: mol_type = other DNA
ctccccctcaaccagaacataatctgcagatgcgatccgcatttggtcacccaagaacggggtcaatatgcctccctagctcatgtgtccgttctgaattgctttgcccg

SEQ ID NO: 78128 - DNA, 110 bp, synthetic construct
  source 1..110: mol_type = other DNA
gtaagcaacgagcccacagcccccgactcgaagggtccagggtgacaccaggttctgcgccttgaccgcgtggcctggcacaactgtggcacctttctgatctcaggcca

SEQ ID NO: 78129 - DNA, 110 bp, synthetic construct
  source 1..110: mol_type = other DNA
tgcgccttgaccgcgtggcctggcacaactgtggcacctttctgatctcaggccaatgcgaggattcagagaagcatcgagcacggcgccccgagccctgcgctctgcac

SEQ ID NO: 78130 - DNA, 110 bp, synthetic construct
  source 1..110: mol_type = other DNA
tgcatctggaagatggttgtattaaagtcggtgtctagtaggtctgccatctggtttttctcaggaataacttctgttgatgttttttcctttgaatgggtcatactttc

SEQ ID NO: 78131 - DNA, 110 bp, synthetic construct
  source 1..110: mol_type = other DNA
ttttctcaggaataacttctgttgatgttttttcctttgaatgggtcatactttctttttttctttttttgtcttttctagggccacacctgcatcatttggaggctagg

SEQ ID NO: 78132 - DNA, 110 bp, synthetic construct
  source 1..110: mol_type = other DNA
gggggcaaggtgaccgtgggtgctggggccaaagaggagaaggagcaaaggctgccaggggtacagcccacagacagagagtggagcccacacggctcctttttcttcag

SEQ ID NO: 78133 - DNA, 110 bp, synthetic construct
  source 1..110: mol_type = other DNA
tttctaaaccggagcccatcctgccaacttcacctggcacggtgcccccctacctcctgcgccatctggaaagagctcgcggatcaagggcacatttctgcccctcattt

SEQ ID NO: 78134 - DNA, 110 bp, synthetic construct
  source 1..110: mol_type = other DNA
cctgcgccatctggaaagagctcgcggatcaagggcacatttctgcccctcatttcatgttactcctttgccggcaggtggcagggccactaaactgctccgtcttctcc

SEQ ID NO: 78135 - DNA, 110 bp, synthetic construct
  source 1..110: mol_type = other DNA
ctgtgcctgcggcatatacaagttccccggccagggatcgaacccaccccacagcaatgacccaagctagtgcagtgacaacgtcagatctgtaacctgctaagccacac

SEQ ID NO: 78136 - DNA, 110 bp, synthetic construct
  source 1..110: mol_type = other DNA
aatgacccaagctagtgcagtgacaacgtcagatctgtaacctgctaagccacacaggaacttgaagagtgaagttatagtcctattaggttgactttcggtgagtttct

SEQ ID NO: 78137 - DNA, 110 bp, synthetic construct
  source 1..110: mol_type = other DNA
aagaaaaaggcaacaaaacccaacactcgaagcaaatcatgtgtttctcagccagttcagctcccagctagtaagtaaattacgtgtttattgcccgcaacgttagtggt

SEQ ID NO: 78138 - DNA, 110 bp, synthetic construct
  source 1..110: mol_type = other DNA
gtgtaccactagctctgtggatgctattttattcgaattcattgcactacatttgccaagcccccatctccgctggcaccaagctagctgctgtacataagcctgcagtc

SEQ ID NO: 78139 - DNA, 110 bp, synthetic construct
  source 1..110: mol_type = other DNA
ccaagcccccatctccgctggcaccaagctagctgctgtacataagcctgcagtcctcacaaccctcagcaaggaaaatgcctcacccagtaacaggcgaacgtgagggc

SEQ ID NO: 78140 - DNA, 110 bp, synthetic construct
  source 1..110: mol_type = other DNA
gtgcctctgatggcacagattcaaccatcgtttctgaggttttataaactctcgtgttgataaaggtcagcaaaggctgctttcttctcgagagaggaagcagcctgggg

SEQ ID NO: 78141 - DNA, 110 bp, synthetic construct
  source 1..110: mol_type = other DNA
ttttggtaatttttcattttgagaaggatcttcctgctgatgcatcgcttagttgagctgttaggagtgttttatgggctgtgataagattgggatacatttccggtaac

SEQ ID NO: 78142 - DNA, 110 bp, synthetic construct
  source 1..110: mol_type = other DNA
acgtcctcatcagtcagagtcaggggaacagtctgttttcctagagaaaacccagttttgctcgtgagacttggaaattgtcaggcctgagttcgagcctcagctgttgt

SEQ ID NO: 78143 - DNA, 110 bp, synthetic construct
  source 1..110: mol_type = other DNA
ttttgctcgtgagacttggaaattgtcaggcctgagttcgagcctcagctgttgttcagtgtgatgttgggccgattacacaccgcgtctgtgcttggctcgcctcgtcg

SEQ ID NO: 78144 - DNA, 110 bp, synthetic construct
  source 1..110: mol_type = other DNA
cctcctggagaacagggcatcttttccttggctcatggctcatagttctttgtcctatggctgtgatgctgatgccttttcttcccatcttcacccattcgtccttcaag

SEQ ID NO: 78145 - DNA, 110 bp, synthetic construct
  source 1..110: mol_type = other DNA
tatggctgtgatgctgatgccttttcttcccatcttcacccattcgtccttcaagaatcagttcaggcatccatccatctatccatccatccggccatccatccattcat

SEQ ID NO: 78146 - DNA, 110 bp, synthetic construct
  source 1..110: mol_type = other DNA
gtctgaaacgtaattcatgagtttcaaggtcagaggaaggggaaacaggtgcacagtgccctgagctctgcacacagcgaactccgggccgactgggctgctgtgggtca

SEQ ID NO: 78147 - DNA, 110 bp, synthetic construct
  source 1..110: mol_type = other DNA
cacctactagctatgtgagtttcaacagggtcctttaatttttctgtgcctctgtttcttcacctaccttgtaaagtcatcatgggggttacatggcttgatatctggaa

SEQ ID NO: 78148 - DNA, 110 bp, synthetic construct
  source 1..110: mol_type = other DNA
ttcttcacctaccttgtaaagtcatcatgggggttacatggcttgatatctggaaagcgatgaaaacaaagcctctgcgtaaaaggcagtattcatcctctcagcgacct

SEQ ID NO: 78149 - DNA, 110 bp, synthetic construct
  source 1..110: mol_type = other DNA
agccagagtttcagagcaattcactgatagcttgagctcccagcccagaatccgggttgtctagactgaatccaggcttctcgccactgtgctttcctgcgctctgctgc

SEQ ID NO: 78150 - DNA, 110 bp, synthetic construct
  source 1..110: mol_type = other DNA
gttgtctagactgaatccaggcttctcgccactgtgctttcctgcgctctgctgctggagacaaaggtgatgcttcctgtggtacccggaccttccactgcatcatctca

SEQ ID NO: 78151 - DNA, 110 bp, synthetic construct
  source 1..110: mol_type = other DNA
aacctgcaacctcatggatgctggttagattcatttccactgtgccatgacgggaactccattttttttttttaagcttatgcgtgcatgacaaagtgttaacatttact

SEQ ID NO: 78152 - DNA, 110 bp, synthetic construct
  source 1..110: mol_type = other DNA
actccattttttttttttaagcttatgcgtgcatgacaaagtgttaacatttactgggtctgagtagtggtgctcgtttatctttctctgtctttttttcagtaggtttc

SEQ ID NO: 78153 - DNA, 110 bp, synthetic construct
  source 1..110: mol_type = other DNA
ctccccctctccctgctagactctgcacatgaactagagtctgttccccagggaagaagaccagtagcaaaccttaagagtatctctcccatttcacagatgagaaaact

SEQ ID NO: 78154 - DNA, 110 bp, synthetic construct
  source 1..110: mol_type = other DNA
gaagaccagtagcaaaccttaagagtatctctcccatttcacagatgagaaaactgaggcacagaaagttgagaacctagcacgaggccctgcactagaaactggcggag

SEQ ID NO: 78155 - DNA, 110 bp, synthetic construct
  source 1..110: mol_type = other DNA
gaaaatgtctttttagaagtcatcaacctaggaaaatctctgccctattgaagtatagtctagcctgattgaatgtaaatctgttagctaagctgatagatgctcttaat

SEQ ID NO: 78156 - DNA, 110 bp, synthetic construct
  source 1..110: mol_type = other DNA
tggggtatggagcataaacatgtcatggaggctgcataaatattggaatatagaaaagacgtttcgtggtgaacagccctcgtgctgtaagttagggggagtgtcgtttg

SEQ ID NO: 78157 - DNA, 110 bp, synthetic construct
  source 1..110: mol_type = other DNA
aagacgtttcgtggtgaacagccctcgtgctgtaagttagggggagtgtcgtttgaagaccttgcctgttcaatcttggccgcagaagatcctaacgtggcaagagggga

SEQ ID NO: 78158 - DNA, 110 bp, synthetic construct
  source 1..110: mol_type = other DNA
ctaccctcttagaggttgggcttcggctactggccgcccttcatctttgtctcatgtggaattcaatagagaagacactgcaattaagggctatgcccccaaacacttgg

SEQ ID NO: 78159 - DNA, 110 bp, synthetic construct
  source 1..110: mol_type = other DNA
gtggaattcaatagagaagacactgcaattaagggctatgcccccaaacacttggatattgaatttccatgttgtgtccagaacttttggttcagtttgtatggcaaatg

SEQ ID NO: 78160 - DNA, 110 bp, synthetic construct
  source 1..110: mol_type = other DNA
agattgcataggtaaggagtggtcttgtgggactgtttctctgttcatgtttcccttctattactgaaagcacatgtgcaacattttccttttctttctttctttctttc

SEQ ID NO: 78161 - DNA, 110 bp, synthetic construct
  source 1..110: mol_type = other DNA
tgtgggactgtttctctgttcatgtttcccttctattactgaaagcacatgtgcaacattttccttttctttctttctttctttctttcttttctttctttctttctttt

SEQ ID NO: 78162 - DNA, 110 bp, synthetic construct
  source 1..110: mol_type = other DNA
attttcaggaactcacacctgagcaggtggttacgtgtcacttgggttttcttttgtgtttcctctctagagtacaagcttcgtgaaaacagggattttgtgtttccatc

SEQ ID NO: 78163 - DNA, 110 bp, synthetic construct
  source 1..110: mol_type = other DNA
gggaagatgatgaagtttggtgaaactgacaaaataaaattgctcaagacaaaggcaacattagcctgaagtgaagtcaatggatctagagtcacatatttcttggatgc

SEQ ID NO: 78164 - DNA, 110 bp, synthetic construct
  source 1..110: mol_type = other DNA
caacattagcctgaagtgaagtcaatggatctagagtcacatatttcttggatgcactcaaagaggaatggtgtcaggaccaagcaggtgtcaatgctcctttgctctgt

SEQ ID NO: 78165 - DNA, 110 bp, synthetic construct
  source 1..110: mol_type = other DNA
aaggcaagtgacactgaagaggcagaaggaacaagaagagccccaagcccgtggaaagtcaaactgggccattagctctgaacaggtgagaatggaggtgttccttgtgc

SEQ ID NO: 78166 - DNA, 110 bp, synthetic construct
  source 1..110: mol_type = other DNA
aagtcaaactgggccattagctctgaacaggtgagaatggaggtgttccttgtgcagagcacatcactctaagcttgccagctccgctccactcacaggtgtgacctgct

SEQ ID NO: 78167 - DNA, 110 bp, synthetic construct; identical to SEQ ID NO: 78165
  source 1..110: mol_type = other DNA

SEQ ID NO: 78168 - DNA, 110 bp, synthetic construct; identical to SEQ ID NO: 78166
  source 1..110: mol_type = other DNA

SEQ ID NO: 78169 - DNA, 110 bp, synthetic construct
  source 1..110: mol_type = other DNA
ttgaaaaggaacaagcctgttagggaaagaagatgtcctagcacttaccttgacagaactgagcttgttttgcattgatctcgtcggggtcatgactcctactagacacc

SEQ ID NO: 78170 - DNA, 110 bp, synthetic construct
  source 1..110: mol_type = other DNA
gaactgagcttgttttgcattgatctcgtcggggtcatgactcctactagacaccttttgtcatatgatcaacactaataggacaataacctgccaacttgatgcacaga

SEQ ID NO: 78171 - DNA, 110 bp, synthetic construct
  source 1..110: mol_type = other DNA
tgcagataactgaggaaagaccgttccatggttttcacggatgcagggtagctggtggccagggcagagggtataatataaagagggaagaggccagcagcgggggaggg

SEQ ID NO: 78172 - DNA, 110 bp, synthetic construct
  source 1..110: mol_type = other DNA
taggataaagttcagttatattatctttcaaatgatatataaatgaactgaacattccaatgaagggcagaaattagccagcaatgaataaacaagacctcactgtgtgt

SEQ ID NO: 78173 - DNA, 110 bp, synthetic construct
  source 1..110: mol_type = other DNA
tccaatgaagggcagaaattagccagcaatgaataaacaagacctcactgtgtgttgtttacatgaaacacacttaacaaaaagacataaataggttaaaagctaaatga

SEQ ID NO: 78174 - DNA, 110 bp, synthetic construct
  source 1..110: mol_type = other DNA
gcaaaatatcctccacttcacaagattgttctgagaattgcatcgcctgagatatacaaagggcttgatagaggagctgatgttaaatatgacgggtaatttcttccttt

SEQ ID NO: 78175 - DNA, 110 bp, synthetic construct
  source 1..110: mol_type = other DNA
cagtgttgtatgccaaaagcccacccaaaagagtgagaaatgacagttagggatacttctaacaaggctctgagttcatacttctctctctcaactagatcctaccaagg

SEQ ID NO: 78176 - DNA, 110 bp, synthetic construct
  source 1..110: mol_type = other DNA
atagattaagcaatgctgctatgaaatgtgctaagtgaggaggaaaaataaaaaagacccgagtgtaacaatcattcaccaaggacggcttatcaaactttcttctgatt

SEQ ID NO: 78177 - DNA, 110 bp, synthetic construct
  source 1..110: mol_type = other DNA
gacccgagtgtaacaatcattcaccaaggacggcttatcaaactttcttctgatttttagcagaaattaaatgtcttacacggaaacaagcatttgtaaatgcaaaaatg

SEQ ID NO: 78178 - DNA, 110 bp, synthetic construct
  source 1..110: mol_type = other DNA
aaatcctggcgtgtgtgaaagctggttatttgttggctacagatatttgtcgatggctgatagcaatgtgtgtttctgccctctgtctttccttcaagggacctactcac

SEQ ID NO: 78179 - DNA, 110 bp, synthetic construct
  source 1..110: mol_type = other DNA
gctgatagcaatgtgtgtttctgccctctgtctttccttcaagggacctactcacaagctgagcacctttgcctctctacttctgctgtgatgtataagcttcctatagt

SEQ ID NO: 78180 - DNA, 110 bp, synthetic construct
  source 1..110: mol_type = other DNA
gttaccatcctggtctgcatcacctgaatgaatcctagtttgtttctttgtctgtaagcctagcaactagaatgattctttaagacaagagttatgacagatcatgacat

SEQ ID NO: 78181 - DNA, 110 bp, synthetic construct
  source 1..110: mol_type = other DNA
ttgatcttgcattcagccattccaaaataaaacatttcccattttcatgtgttttaccgtgtggaggtaatccttccaagaaaaggctagatttcacctctcatcagata

SEQ ID NO: 78182 - DNA, 110 bp, synthetic construct
  source 1..110: mol_type = other DNA
accgtgtggaggtaatccttccaagaaaaggctagatttcacctctcatcagataactagtaaaactgatttctacagagctgggagatcagaatcagttttcaaatgcc

SEQ ID NO: 78183 - DNA, 110 bp, synthetic construct
  source 1..110: mol_type = other DNA
aatgttctcccccaataaaatcactatgcgtctaatcctgtcttctcagaagtttctgcttctcagaggacctgggataacagctgtcttcccttttcagtgttatttct

SEQ ID NO: 78184 - DNA, 110 bp, synthetic construct
  source 1..110: mol_type = other DNA
atgtttggtaacagatggcaattaggctgatcgtggtgataatttttaatgcataggagtatcagatcactgcattgtgtacaaggagctaacatggtgtcgtaggtcaa

SEQ ID NO: 78185 - DNA, 110 bp, synthetic construct
  source 1..110: mol_type = other DNA
ggagtatcagatcactgcattgtgtacaaggagctaacatggtgtcgtaggtcaattatactccagaaataaacaaacaaagttatagaaaaagaggtcagatttgtggt

SEQ ID NO: 78186 - DNA, 110 bp, synthetic construct
  source 1..110: mol_type = other DNA
tcagagaaaatgatctatatttctgcctctagacccatactactttttttcaaacttctctgtgtagaaatattctacagcccatgaaagtccaaagcttctatatttct

SEQ ID NO: 78187 - DNA, 110 bp, synthetic construct
  source 1..110: mol_type = other DNA
ttcagcatgaggtggttgtgaagatttcaaaagctaacccaggagtttccttgtggctccgcatgttaaggatcccggtgttgtcactgctttggctctggttacagcta

SEQ ID NO: 78188 - DNA, 110 bp, synthetic construct
  source 1..110: mol_type = other DNA
gataccagtaagccccatttaaaatgactatttttcagaagttccattgtggatcagcagtttaagaaccatacgtagtgtcagggaggatgagggtttgacccctggtc

SEQ ID NO: 78189 - DNA, 110 bp, synthetic construct
  source 1..110: mol_type = other DNA
agcagtttaagaaccatacgtagtgtcagggaggatgagggtttgacccctggtctctcttggtgggttaaggatccagagtcgccataagctgcggctaggtcacagat

SEQ ID NO: 78190 - DNA, 110 bp, synthetic construct
  source 1..110: mol_type = other DNA
gtttgggttaagaaacatctccattttacactccaggtaattgtacaacttagttcgtgttccctgggaaatcatagattctggatttgttcagcactcgtgattctaaa

SEQ ID NO: 78191 - DNA, 110 bp, synthetic construct
  source 1..110: mol_type = other DNA
gaaattgggatgagaataataatccttagctcacgtgattttcacctggattacacaatgtactgtggaggatgtatgcggctgacactgagagtgacagggtctcagtc

SEQ ID NO: 78192 - DNA, 110 bp, synthetic construct
  source 1..110: mol_type = other DNA
aatgtaaacgagcatctccaccaccttaatgctgataacagagatgacatgatacattttacccttggcctttaaagacatgtcgagggggttattctattggttagtga

SEQ ID NO: 78193 - DNA, 110 bp, synthetic construct
  source 1..110: mol_type = other DNA
ccaggattcctgcagccactaccaatcagagggagtcagcctcgggacaaagcacaggtgacatcctgtcacatctagatttctatctgtaaaatgggaattgctatgga

SEQ ID NO: 78194 - DNA, 110 bp, synthetic construct
  source 1..110: mol_type = other DNA
ctagttttgtgcagctcccaagggcagaaggaggaccaacaagtgcagtaaacaatgctgcttttggctcaaaaaagcaaggattttaaattttgaaaaaattggacgaa

SEQ ID NO: 78195 - DNA, 110 bp, synthetic construct
  source 1..110: mol_type = other DNA
tgtttattagtggcctgttactcaccacaaagcatctcctagaactttaaatacaggcttataactctgacactgaaaataaaaaaacagcaaaaagtattttttgtata

SEQ ID NO: 78196 - DNA, 110 bp, synthetic construct
  source 1..110: mol_type = other DNA
acctttggcatgcatgtgtgtgaaggaatttcataaacggtaaagtgctgtccaagaggaatggattatgcacctggaataaccttgagctttctccctacgtccctaca

SEQ ID NO: 78197 - DNA, 110 bp, synthetic construct
  source 1..110: mol_type = other DNA
gaggaatggattatgcacctggaataaccttgagctttctccctacgtccctacagtgttctgcttctgaaacaaatgcatatattgtctcatctgtccttcccttgccc

SEQ ID NO: 78198 - DNA, 110 bp, synthetic construct
  source 1..110: mol_type = other DNA
cctctaccttttagaatccatgacctaaatggagatgcctccatttcttctcggcaaggtcagcagcagcaaccatctatatctagccataaaatctgttatgatcacat

SEQ ID NO: 78199 - DNA, 110 bp, synthetic construct
  source 1..110: mol_type = other DNA
tgcctccatttcttctcggcaaggtcagcagcagcaaccatctatatctagccataaaatctgttatgatcacatacaactacagatgtgataaattcatttgcataata

SEQ ID NO: 78200 - DNA, 110 bp, synthetic construct
  source 1..110: mol_type = other DNA
tatcttcagccagaagatgaagtctggctggagatcttcttcactgaccagaatggcctcttctcagacccaggttgggcagacagcttgttctccggatttctcctgta

SEQ ID NO: 78201 - DNA, 110 bp, synthetic construct
  source 1..110: mol_type = other DNA
aaagagggatggaaagcagaaaggagtgaaagaagggaggaagaaagaaaggaagaaagaaagggggaggaaggaaagaaaacagacaaacagatgctcaatctgacaac

SEQ ID NO: 78202 - DNA, 110 bp, synthetic construct
  source 1..110: mol_type = other DNA
aaagaaagggggaggaaggaaagaaaacagacaaacagatgctcaatctgacaaccttgaactctgagagcttaataccatgttctgaaccaggcagcaagctttctgat

SEQ ID NO: 78203 - DNA, 110 bp, synthetic construct
  source 1..110: mol_type = other DNA
tccatggaaacaggaggctttgagccatagcctgcagctcatctcaaaaggctacagaggaaatggtttatattcctcacttgatgactacagacagcaaatgctgcctg

SEQ ID NO: 78204 - DNA, 110 bp, synthetic construct
  source 1..110: mol_type = other DNA
tcttgaagagagggcttcttgccacctggaggcatcttctctgggaccttgacggtggtctggggtggtgatctctgttccttgggcagcccggccaggaaggtgatcct

SEQ ID NO: 78205 - DNA, 110 bp, synthetic construct
  source 1..110: mol_type = other DNA
tggtctggggtggtgatctctgttccttgggcagcccggccaggaaggtgatcctggtcagtggctttcagctggccatctgtcccccttctccttgtccttctccagcc

SEQ ID NO: 78206 - DNA, 110 bp, synthetic construct
  source 1..110: mol_type = other DNA
attgtcccggaggaagtaggattttattgcttgtttatgtcagttcccaattattttctgtctcaccacatttattggcttatggcccctgcttttaactcaacaggagc

SEQ ID NO: 78207 - DNA, 110 bp, synthetic construct
  source 1..110: mol_type = other DNA
tttgaattttcattgaaacctttccttctccagggttttctgaccttcaagccgtgaccttagccgggtggactctgagtatcaggtctgagtattaaagagtacaatgg

SEQ ID NO: 78208 - DNA, 110 bp, synthetic construct
  source 1..110: mol_type = other DNA
agcacggaaggaagtgattgctatggatacctgaggtttgctttctgcgtatctcctttttgggactgtctctgccattttttccatggtctttcttgggccatcactca

SEQ ID NO: 78209 - DNA, 110 bp, synthetic construct
  source 1..110: mol_type = other DNA
ctttttgggactgtctctgccattttttccatggtctttcttgggccatcactcacaccgctccattatccgctgtggtagactgctactctgacagccccaagaaaccc

SEQ ID NO: 78210 - DNA, 110 bp, synthetic construct
  source 1..110: mol_type = other DNA
gctgtcatctgcctcagaagtctccggggatgtttaccatgcctttagctacagtggaagccttggccccaaataattgattctaccccaaattaacagccagtgagtgt

SEQ ID NO: 78211 - DNA, 110 bp, synthetic construct
  source 1..110: mol_type = other DNA
ttgtgtgttcctgctgcctgggagctagtcctggtctaaggcttattttgtttgctgtgtgatagtatgcacattacttaacctttttgtgctttgtttacctcagctgt

SEQ ID NO: 78212 - DNA, 110 bp, synthetic construct
  source 1..110: mol_type = other DNA
gtcggatttgttaaccactgcgccacgatgggaactcccaaacatattcttaaagatacttttatagttaccaaaggagaaaggggggagggatacattaggcgtatgag

SEQ ID NO: 78213 - DNA, 110 bp, synthetic construct
  source 1..110: mol_type = other DNA
tcccaaacatattcttaaagatacttttatagttaccaaaggagaaaggggggagggatacattaggcgtatgagactaacagatacacaactactatatataaaataga

SEQ ID NO: 78214 - DNA, 110 bp, synthetic construct
  source 1..110: mol_type = other DNA
gatgcttccctgcaacatagtgcggaagtgagtgacccactgattagggaagaatgtgtttctgtcagccatgcagggcagatggcgttattttgtctctctttccaaac

SEQ ID NO: 78215 - DNA, 110 bp, synthetic construct
  source 1..110: mol_type = other DNA
gtgtttctgtcagccatgcagggcagatggcgttattttgtctctctttccaaactctgaaaaaggatcccctcttcccacaggtcccatcatcctcacaagtcatgcac

SEQ ID NO: 78216 - DNA, 110 bp, synthetic construct; identical to SEQ ID NO: 78214
  source 1..110: mol_type = other DNA

SEQ ID NO: 78217 - DNA, 110 bp, synthetic construct; identical to SEQ ID NO: 78215
  source 1..110: mol_type = other DNA

SEQ ID NO: 78218 - DNA, 110 bp, synthetic construct
  source 1..110: mol_type = other DNA
tatgtcttagtcttggcaagtgcagccgtcagctttgttggaacggcaccccagagtatcacagatttgcattcgaaggttgtggggaggggaaacttccactcccctaa

SEQ ID NO: 78219 - DNA, 110 bp, synthetic construct
  source 1..110: mol_type = other DNA
ggaaaggtcagagcctttcatcagccaaggtgggggggggggtgtcacgtgttctggttccctgtgacctttctgagctcatttcctcctcttctccttcccattcgctc

SEQ ID NO: 78220 - DNA, 110 bp, synthetic construct
  source 1..110: mol_type = other DNA
ggttccctgtgacctttctgagctcatttcctcctcttctccttcccattcgctctactccaaccacccatacctccttgccaggcctcagtcatgccaagcacaccccc

SEQ ID NO: 78221 - DNA, 110 bp, synthetic construct; identical to SEQ ID NO: 78219
  source 1..110: mol_type = other DNA

SEQ ID NO: 78222 - DNA, 110 bp, synthetic construct; identical to SEQ ID NO: 78220
  source 1..110: mol_type = other DNA

SEQ ID NO: 78223 - DNA, 110 bp, synthetic construct
  source 1..110: mol_type = other DNA
ttagacgaggaccacctaaggttggagtttggaggtggtccttgtcctatactgtatgactgtcagcttagacacaatgaatcagactgatgaaatgcttgccaagctaa

SEQ ID NO: 78224 - DNA, 110 bp, synthetic construct
  source 1..110: mol_type = other DNA
taattccctcatgaaggcctaatcctcatgacctaatctaatcctaattatcttccaaaggtctcatcttgaaataccattatattgggggttagatcgtcaatatatga

SEQ ID NO: 78225 - DNA, 110 bp, synthetic construct
  source 1..110: mol_type = other DNA
aatactttcatgtaagacaaggacagtgggacatccaaatcatccctcaggaatggcttcaaactacttcttttgataacattctgcctgacatgttcagtgcacccatc

SEQ ID NO: 78226 - DNA, 110 bp, synthetic construct
  source 1..110: mol_type = other DNA
gctagggtgggtggtttagacaacagaaatttatttcagcacagttctggagcctagaagcccaagatcaaggtgacagcaatgttggctcctggtaaagctgatctctt

SEQ ID NO: 78227 - DNA, 110 bp, synthetic construct
  source 1..110: mol_type = other DNA
agaagcccaagatcaaggtgacagcaatgttggctcctggtaaagctgatctctttgggttgtagatagtaccttcttactgtgttctcatgtagcttttcctctgtgta

SEQ ID NO: 78228 - DNA, 110 bp, synthetic construct
  source 1..110: mol_type = other DNA
agtacatcctatcccttacctaaagactatttacttggaattctctatacctctagaagctataataccttacaattttttaaagtcattcaagacttccccattgaaga

SEQ ID NO: 78229 - DNA, 110 bp, synthetic construct
  source 1..110: mol_type = other DNA
ctaatgaaactcctaagaggagataaagagcctatggacttcctttccaagtcacatgggtacatttaaaagacaataatggcattttattgttcaaaatctttttacgt

SEQ ID NO: 78230 - DNA, 110 bp, synthetic construct
  source 1..110: mol_type = other DNA
tccaagtcacatgggtacatttaaaagacaataatggcattttattgttcaaaatctttttacgtgtaaacatcaaaatccagaatggatttcaaaaatgctctgcctca

SEQ ID NO: 78231 - DNA, 110 bp, synthetic construct
  source 1..110: mol_type = other DNA
ggttgtcacaatccaggtaagagataacaatggtttgggtcaggtgagtgagatttggggttagacagaagcgggtacatttcgagactatctttctgcctttttgtctt

SEQ ID NO: 78232 - DNA, 110 bp, synthetic construct
  source 1..110: mol_type = other DNA
tggggttagacagaagcgggtacatttcgagactatctttctgcctttttgtcttccttttagttttttaaatgtttttccaattatatttaataagaagttctcacttt

SEQ ID NO: 78233 - DNA, 110 bp, synthetic construct
  source 1..110: mol_type = other DNA
aacactgcgtggtggctcacaagctcccacagcaggatccaaacagctggggcgccagggggaggaggcccgattttatcacagagatgcccgtgatttaggaaagggag

SEQ ID NO: 78234 - DNA, 110 bp, synthetic construct
  source 1..110: mol_type = other DNA
cacacgttttctccatgaggcataacgtcacagcttctttactgttagcaacaattgacggcacttcagctataacttggggtcattttaaataaaatcaactccccaaa

SEQ ID NO: 78235 - DNA, 110 bp, synthetic construct
  source 1..110: mol_type = other DNA
aactcaggcgagattcaattatgtgtcatgtttggaatcatgtgttcttcatcgatgagctgaaaatgcctcctttcgtgcagagatgggcctaaataatttcttatatt

SEQ ID NO: 78236 - DNA, 110 bp, synthetic construct
  source 1..110: mol_type = other DNA
tagtaacaatcttctgacagtgatagaaggaaaggaataactcgaaatatttgagaagttaaaaatccgaccagaattggaatggatagaaagggaaaacagggtggtgc

SEQ ID NO: 78237 - DNA, 110 bp, synthetic construct
  source 1..110: mol_type = other DNA
aagttaaaaatccgaccagaattggaatggatagaaagggaaaacagggtggtgctgaggattcctttaagttttcttgctgtcagacagctttcctttttgacagcaaa

SEQ ID NO: 78238 - DNA, 110 bp, synthetic construct
  source 1..110: mol_type = other DNA
atttcttccgtgagagttttcaaagtattttattagcatccttccaataagctgctacaataggatgtattggtattatgattgcgtttgaacacagagcaggttaacag

SEQ ID NO: 78239 - DNA, 110 bp, synthetic construct
  source 1..110: mol_type = other DNA
agagcctcataagtctcccaaagcttaaatcatcccctaacgctattaccaagttgttttcattgcacctaagaaaattgagtaacagttattgcccaagtcaggggtga

SEQ ID NO: 78240 - DNA, 110 bp, synthetic construct
  source 1..110: mol_type = other DNA
attccgtgatctccacagagtggaaaccagcaggtggatttctttcacttcaggtggggaggagagaatatttcctgggtacttagggaagaagagcattcactctgagt

SEQ ID NO: 78241 - DNA, 110 bp, synthetic construct
  source 1..110: mol_type = other DNA
ggggaggagagaatatttcctgggtacttagggaagaagagcattcactctgagtgagaacctggaataagggatacacgtgacttagccacaaggatggagaataaatg

SEQ ID NO: 78242 - DNA, 110 bp, synthetic construct
  source 1..110: mol_type = other DNA
gggtctattaatagcctaaactaccatttgtggcagaggcgatattttagtgattatgagctgaggttccaatctctactctgcaatttactacaacctatttgcagcct

SEQ ID NO: 78243 - DNA, 110 bp, synthetic construct
  source 1..110: mol_type = other DNA
atgagctgaggttccaatctctactctgcaatttactacaacctatttgcagcctactgcagctgtttttgttaactgctcatgatgttactgaatgctcattatgggtc

SEQ ID NO: 78244 - DNA, 110 bp, synthetic construct
  source 1..110: mol_type = other DNA
ggtaagtctggctcagcctcttattaagtcactgcttttgccctgggtcctagtgtgcttgagactttgtgtgcaccctccaagagtggagtctctgtttccccccatcc

SEQ ID NO: 78245 - DNA, 110 bp, synthetic construct
  source 1..110: mol_type = other DNA
gcctcttattaagtcactgcttttgccctgggtcctagtgtgcttgagactttgtgtgcaccctccaagagtggagtctctgtttccccccatcctttggagctcctgcc

SEQ ID NO: 78246 - DNA, 110 bp, synthetic construct
  source 1..110: mol_type = other DNA
cctcttttaaatttggaaacagctggatgcctatagagaatttagagagaacatttctattgtgggtcctgtctgacagatcatacgctatactactgggcagttcctac

SEQ ID NO: 78247 - DNA, 110 bp, synthetic construct
  source 1..110: mol_type = other DNA
gctggcagctatagcactgattcaaccctctaggaggaactttcatatgtcgtgtgtgtggccccccaaaaataacaacaacgacaactaaaacaataaagtaaaatgtg

SEQ ID NO: 78248 - DNA, 110 bp, synthetic construct
  source 1..110: mol_type = other DNA
gatggagacatggtataatcaacacctgcccccttggataaacaacctataaacagaaggataatgataactgtagagtttctccccagagaatgaggggtctgagcccc

SEQ ID NO: 78249 - DNA, 110 bp, synthetic construct
  source 1..110: mol_type = other DNA
acacagccaaaccggtttcatccatttgaagactaccagtccctcgtgaattaggttttaacacaactccagtggctatgtagacatttctagcatctttactccatttt

SEQ ID NO: 78250 - DNA, 110 bp, synthetic construct
  source 1..110: mol_type = other DNA
gagtccagctcctggttaaaatccaatgtatgacttttcaggactgacaaaggccctgtctagaaggtgtcatgggggagagttgccctccctacaccagacttggtaca

SEQ ID NO: 78251 - DNA, 110 bp, synthetic construct
  source 1..110: mol_type = other DNA
ctgtctagaaggtgtcatgggggagagttgccctccctacaccagacttggtacacagccagtgcactgtagtctctgaggggagttgcaatcaagagctaagtccctat

SEQ ID NO: 78252 - DNA, 110 bp, synthetic construct
  source 1..110: mol_type = other DNA
gtagatgactattgaaagagaagaaggtaccaaagacaactcctagatttataatgtgatcatttgggcaaattaaagtttcattttgatgagagatacatatatatggg

SEQ ID NO: 78253 - DNA, 110 bp, synthetic construct
  source 1..110: mol_type = other DNA
gtgatcatttgggcaaattaaagtttcattttgatgagagatacatatatatgggaggaagacatgcaaagtttgaagttctttgagattttttttcaagtacacatgta

SEQ ID NO: 78254 - DNA, 110 bp, synthetic construct
  source 1..110: mol_type = other DNA
cagcacactatggtagagaggagactccggtccctactcatattctgtcctatcatttttgtcatggtgatgccaaggaaatctttgttgctctcccagtattcccaaaa

SEQ ID NO: 78255 - DNA, 110 bp, synthetic construct
  source 1..110: mol_type = other DNA
tttttgtcatggtgatgccaaggaaatctttgttgctctcccagtattcccaaaaactgtgtgtgtatatgtatgtgtgtaacagagagagacaaagattgatttttctg

SEQ ID NO: 78256 - DNA, 110 bp, synthetic construct
  source 1..110: mol_type = other DNA
agtgctttgatcatatcctccttatattcctgggagacggtctctgttttgtgcggcccctttctaacatcaagaggttggaggagtagagatgggcaagggtgaggcca

SEQ ID NO: 78257 - DNA, 110 bp, synthetic construct
  source 1..110: mol_type = other DNA
gcaaagtcctttcagaattcggcaacatggctcatcttgattatgccaccagtctctttgatgggaggctcacccgtttcctctaagaataaggctgcgatttaaggttt

SEQ ID NO: 78258 - DNA, 110 bp, synthetic construct
  source 1..110: mol_type = other DNA
ctttgatgggaggctcacccgtttcctctaagaataaggctgcgatttaaggtttaacttcaaacatttaaggcacttaagatgccaggtccaatttatctacagcttct

SEQ ID NO: 78259 - DNA, 110 bp, synthetic construct
  source 1..110: mol_type = other DNA
agagagagtacaaattgccaccaaatgtcacttgcttcaaaagaatgtgtgacaggcaatatctacagtttccaacttcaaatgtccctttaggtatttataggcaaatt

SEQ ID NO: 78260 - DNA, 110 bp, synthetic construct
  source 1..110: mol_type = other DNA
gcaatatctacagtttccaacttcaaatgtccctttaggtatttataggcaaattactaaggactaaatacgaaaactcaaaattttgaagatgcggaaatagctgaaat

SEQ ID NO: 78261 - DNA, 110 bp, synthetic construct
  source 1..110: mol_type = other DNA
agattgccagcaaagtatgtatttatcaaagtgtttctaatggccctgtcattataagatccaataccttctaaactttctgattaatggctttagaatttggggtggag

SEQ ID NO: 78262 - DNA, 110 bp, synthetic construct
  source 1..110: mol_type = other DNA
cggttccctttccccagaccccccacttccaatctctcttatttaactgagtttgacatggctctaatacttatttagagctgcagtgacctctgtccaaggcctcaccc

SEQ ID NO: 78263 - DNA, 110 bp, synthetic construct
  source 1..110: mol_type = other DNA
acaaagagccagagtatgtttcccttctattccaaagacaatgcatcttacagcacacttctccaatttgaaaaactggctctctcttcgttttgaggacaatatgctaa

SEQ ID NO: 78264 - DNA, 110 bp, synthetic construct
  source 1..110: mol_type = other DNA
cacttctccaatttgaaaaactggctctctcttcgttttgaggacaatatgctaaccaatcactacagccccagtgctggattcatttcttgggttctatgctgaccagg

SEQ ID NO: 78265 - DNA, 110 bp, synthetic construct
  source 1..110: mol_type = other DNA
ttcagaaccatgacatcctcttatttcctggccctcacttggaacctctttgcttctagaagcagctgccaatttgtttaagaggataatgggtcagggtgcattttggc

SEQ ID NO: 78266 - DNA, 110 bp, synthetic construct
  source 1..110: mol_type = other DNA
aaaaaaaaaaaaaaaagaagcaacctccatatttactgttctagaacaatctccaagatacaatgtgagatcagcagcatattactcctgaaccagccctgctataaatg

SEQ ID NO: 78267 - DNA, 110 bp, synthetic construct; identical to SEQ ID NO: 78266
  source 1..110: mol_type = other DNA

SEQ ID NO: 78268 - DNA, 110 bp, synthetic construct
  source 1..110: mol_type = other DNA
gggtaaatcaagaagatatttgacttttttcagctaattggttgcctggtggtcgtcttttttaatttgatcagggtagctgagtcaggaaatccaaagatggcatgaat

SEQ ID NO: 78269 - DNA, 110 bp, synthetic construct
  source 1..110: mol_type = other DNA
gtctatatattcaagcagtaccctgtctttctttttcaacagtggttgcataacaacatatgaacgaataataaatagctggcattggtcaagcacttaccctgtgccac

SEQ ID NO: 78270 - DNA, 110 bp, synthetic construct
  source 1..110: mol_type = other DNA
tgaacccactcttttcctcttgcccagaagaggaagcaggcatacctctggggcaggcgagggagctggaattctcccagcgggctgctttccagacctgaggccccagc

SEQ ID NO: 78271 - DNA, 110 bp, synthetic construct
  source 1..110: mol_type = other DNA
ggcgagggagctggaattctcccagcgggctgctttccagacctgaggccccagcattgtctgggtctttcacataattggtccttattcctcatccacagacacactaa

SEQ ID NO: 78272 - DNA, 110 bp, synthetic construct
  source 1..110: mol_type = other DNA
caggttcgttaccattgacctatgatgggaactcctgggtatgattcttgatgcgccagaagaaaagatccctacagggtctgtcctttgacataaagcctgagagagga

SEQ ID NO: 78273 - DNA, 110 bp, synthetic construct
  source 1..110: mol_type = other DNA
cctccttttataaggccacgcggatgacactgggcccacccggataatccagcgtaatctccccatctcaaaatccttagctgaaccacatcggaaagtccttttggatc

SEQ ID NO: 78274 - DNA, 110 bp, synthetic construct
  source 1..110: mol_type = other DNA
ttgatggttggtgggaggtgagtggggattcaagttaaaagaaaaccctaaaacaacaaactggctgtggacttcgtgcagatgctcagacccagtaagaaaaccagttt

SEQ ID NO: 78275 - DNA, 110 bp, synthetic construct
  source 1..110: mol_type = other DNA
acaaactggctgtggacttcgtgcagatgctcagacccagtaagaaaaccagtttggagggaagaatcatgcacattattagcaattttgcaaatcagtaaagctattgg

SEQ ID NO: 78276 - DNA, 110 bp, synthetic construct
  source 1..110: mol_type = other DNA
cagtaattactgatgtccacgaatgtccccacccaccagggttgctggtagaccgcgggcagctgggtaagcaggcagctgtccatcaaggctgaaagaaacaggttcca

SEQ ID NO: 78277 - DNA, 110 bp, synthetic construct
  source 1..110: mol_type = other DNA
cttggatactagtcaggtttgtttctgttgaaccacagcggggactcccccaattgacttacttttgacctctgtcttttcctgtcttcttttcttcctctttctaaaat

SEQ ID NO: 78278 - DNA, 110 bp, synthetic construct; identical to SEQ ID NO: 78277
  source 1..110: mol_type = other DNA

SEQ ID NO: 78279 - DNA, 110 bp, synthetic construct
  source 1..110: mol_type = other DNA
atagtcattacaaactctcaaatacacatatattgtaaacacaaagacatgcatgcatatgtatacaaacttactgcagaaaccatttgtaagacccacattaaaagggt

SEQ ID NO: 78280 - DNA, 110 bp, synthetic construct; identical to SEQ ID NO: 78279
  source 1..110: mol_type = other DNA

SEQ ID NO: 78281 - DNA, 110 bp, synthetic construct
  source 1..110: mol_type = other DNA
gatggtgctgaagaacttacttaaactttggatttaagctttctttaaaattgacttcgagcattaggtctcttaaatagctgtataaagtagaataaactgctaagcct

SEQ ID NO: 78282 - DNA, 110 bp, synthetic construct
  source 1..110: mol_type = other DNA
atttggaatcattatgatgtttactttgcatcaaggaaagcaatgacaagtgcgtactaatgaaaataagctgttgaagggaactgccaattagttagaaacaattctgc

SEQ ID NO: 78283 - DNA, 110 bp, synthetic construct
  source 1..110: mol_type = other DNA
tttgacctcagctatcactgtaagagctgcttaattatagtccctgactccttcacactcctgttgcttccagaatgatcttatatataaaaaatagtttgaatctacct

SEQ ID NO: 78284 - DNA, 110 bp, synthetic construct
  source 1..110: mol_type = other DNA
ctgtgacacaggggaaatcccatcaagtcttttaaattttcctagtaactaattctggaggcttttcaaaacctcttcctctattcaaatttcccatctccttcaccctt

SEQ ID NO: 78285 - DNA, 110 bp, synthetic construct
  source 1..110: mol_type = other DNA
tggaggcttttcaaaacctcttcctctattcaaatttcccatctccttcacccttagctttttgctgtgtagataaatctgtcttctccatttatgtacttcctccttca

SEQ ID NO: 78286 - DNA, 110 bp, synthetic construct
  source 1..110: mol_type = other DNA
ttttatgtcactgagtgaacaaaaaaaatcagaacatcaagacactcacaccactacatctactcagctccctctattagccgcaggtgttatttctccccatttcttac

SEQ ID NO: 78287 - DNA, 110 bp, synthetic construct
  source 1..110: mol_type = other DNA
acatctactcagctccctctattagccgcaggtgttatttctccccatttcttactgtatatgaagacaattagtggttgtaaacaaactcatctaaaaatactttttgc

SEQ ID NO: 78288 - DNA, 110 bp, synthetic construct
  source 1..110: mol_type = other DNA
aaaaagatggtcaacaccactaatcctcagggaaatgcaaaccaataccacccttcagaatagctgtagtcaaaaagagaataaataacaaggactgatgaagatatgga

SEQ ID NO: 78289 - DNA, 110 bp, synthetic construct
  source 1..110: mol_type = other DNA
atgtatttatttcgaaataattttgaaacattttgccttctgcaatcacttcagcaactatttaagaggctaaggtcactaaggtcaccaaatgattactgcagtggaac

SEQ ID NO: 78290 - DNA, 110 bp, synthetic construct
  source 1..110: mol_type = other DNA
tggaaaactgagtcttgctgcacctgctgctatttttggagaaaaaaaatcatacacaggacctgcttcttagctcactttggtgtgataaggccagctgatgtattgta

SEQ ID NO: 78291 - DNA, 110 bp, synthetic construct
  source 1..110: mol_type = other DNA
caactttagtgaagatttatctggtaatattataatgcactcatgttttattttgcaacaatttgccactctagcattgttcatatctctatttagtagctactcattcc

SEQ ID NO: 78292 - DNA, 110 bp, synthetic construct; identical to SEQ ID NO: 78291
  source 1..110: mol_type = other DNA

SEQ ID NO: 78293 - DNA, 110 bp, synthetic construct; identical to SEQ ID NO: 78291
  source 1..110: mol_type = other DNA

SEQ ID NO: 78294 - DNA, 110 bp, synthetic construct; identical to SEQ ID NO: 78291
  source 1..110: mol_type = other DNA

SEQ ID NO: 78295 - DNA, 110 bp, synthetic construct
  source 1..110: mol_type = other DNA
agaagtctagaatttaggtgtccgcagggccatgctccctccatagaccctaaagaggaatttttgaatctcccagcttctggcggctatagatgtttcttgttttgtgg

SEQ ID NO: 78296 - DNA, 110 bp, synthetic construct
  source 1..110: mol_type = other DNA
ttcccacaagtacatcctcacctgccttagaccaacagaatccccacaaagatccagaggggaaaagagcttgttttgaaagaatacaatattcctgaagatgggaagca

SEQ ID NO: 78297 - DNA, 110 bp, synthetic construct
  source 1..110: mol_type = other DNA
ccccattttatttaaagactatttatggggccatcatactagaacacctatgaggagttcaagttctggagatggtgagaaacttgatattgtgtttaattatttaggta

SEQ ID NO: 78298 - DNA, 110 bp, synthetic construct
  source 1..110: mol_type = other DNA
agggccaaaggtgaatgttttgaggagcttagataaaactagctttgccacttttgaattatattctagaatggagggggggaaatgtgttccctactggaccatgagac

SEQ ID NO: 78299 - DNA, 110 bp, synthetic construct
  source 1..110: mol_type = other DNA
gaattatattctagaatggagggggggaaatgtgttccctactggaccatgagactccaacactttcttttgcctgcaaaattcaaaaatgtgttgtgatacaaacctca

SEQ ID NO: 78300 - DNA, 110 bp, synthetic construct
  source 1..110: mol_type = other DNA
tgcttttctcaaggttcattcccagcccctgggctgttccagatgcagatggaaggaggcagcaccatgagataccagagggttctgagggagctcaatttaattaatca

SEQ ID NO: 78301 - DNA, 110 bp, synthetic construct
  source 1..110: mol_type = other DNA
gaggcagcaccatgagataccagagggttctgagggagctcaatttaattaatcatccttcttaaacttgatgttgatgtagggtacccagtccagaatcaaccccattg

SEQ ID NO: 78302 - DNA, 110 bp, synthetic construct
  source 1..110: mol_type = other DNA
ctgtagtgctccattacttccagagactatgtcacgggctacatgtttatgtattgaagctctagccaatgatgtgatgatattagtaggcagagcctttgacaggtcaa

SEQ ID NO: 78303 - DNA, 110 bp, synthetic construct
  source 1..110: mol_type = other DNA
aaaaattcctgctgttcaaatgccttcatctcttttgtggatctttccaaaggatgcataggtgtggtagctggtctctctcagaagataaaggatgcaggaaaaggaat

SEQ ID NO: 78304 - DNA, 110 bp, synthetic construct
  source 1..110: mol_type = other DNA
aatttgcaatttgcttataatcaggtaactccaagatttctatattttccttctgttcctgagctactagtttccagtctcttttattccctttctactagtaccaacca

SEQ ID NO: 78305 - DNA, 110 bp, synthetic construct
  source 1..110: mol_type = other DNA
ttcctgagctactagtttccagtctcttttattccctttctactagtaccaaccagcctggtttcctagcacatcttaatttcacgggccaaataaagccctaggtcatg

SEQ ID NO: 78306 - DNA, 110 bp, synthetic construct
  source 1..110: mol_type = other DNA
tttgcggtgttaaaagggtcagataaaaggattcatggaagttggaggaaaaacggaagataaaagagagggaaagaggatggagggatgatgggaagagagaggcttag

SEQ ID NO: 78307 - DNA, 110 bp, synthetic construct
  source 1..110: mol_type = other DNA
taaaaccacacttgggcatcagcaatgcagtataagagcaccttgtctgtgcataggagtcagctataggccagaagtgggagaatattgactgcttgtgctttccagcc

SEQ ID NO: 78308 - DNA, 110 bp, synthetic construct
  source 1..110: mol_type = other DNA
aaaccagagaaaccaaaaagccaaacttccatttgaaatctcacgtctgtcacctggggcagttttaacaaaatatctttactcacttaactcttcatcctagttagatt

SEQ ID NO: 78309 - DNA, 110 bp, synthetic construct
  source 1..110: mol_type = other DNA
ctggaacttgtattgttgccactaagctgaagaaacagataatgaagttcatgtaaaccagagcaaccaggaattaagaggacagaatggcagagaaatagaaccatgga

SEQ ID NO: 78310 - DNA, 110 bp, synthetic construct
  source 1..110: mol_type = other DNA
ctcctattagaaaggtatgtgaagtttcatgtttctttggtgaacataagtggactaacctccccaggtacttttcccttagcttatcccagcctttaaaacccctactt

SEQ ID NO: 78311 - DNA, 110 bp, synthetic construct
  source 1..110: mol_type = other DNA
ttgggttcttaacccactgagccactatgggaactcaccgtacatgctctttcaaggaggtggagcacaacttcagcttcttccctgcaagctgtgtatattgacttctg

SEQ ID NO: 78312 - DNA, 110 bp, synthetic construct
  source 1..110: mol_type = other DNA
ggaggtggagcacaacttcagcttcttccctgcaagctgtgtatattgacttctgaagagcacagtacgaaaagggacgccaagaaagggtaaatttacaatggatcaag

SEQ ID NO: 78313 - DNA, 110 bp, synthetic construct
  source 1..110: mol_type = other DNA
agggttgttcttgagattgatagtgattcattcacgcaaaagtctatggagtgtctaccatgttctaagcccgattctgaatgctaggaatgaagaagtgaacaaggcag

SEQ ID NO: 78314 - DNA, 110 bp, synthetic construct
  source 1..110: mol_type = other DNA
taccatgttctaagcccgattctgaatgctaggaatgaagaagtgaacaaggcagatcatggcctgattctccagaagtttacactcttgtgaaaggtggaaggcaataa

SEQ ID NO: 78315 - DNA, 110 bp, synthetic construct
  source 1..110: mol_type = other DNA
ctcatggccttatatatgtgaggctaaaagggtcaccaaagaggcctttataatagcaaagagggaatgatggcatttactccagaatttagacatggctgttgccttta

SEQ ID NO: 78316 - DNA, 110 bp, synthetic construct
  source 1..110: mol_type = other DNA
gcaaagagggaatgatggcatttactccagaatttagacatggctgttgcctttaaaatggtacattttggtccccactttatatgccagacactacaagggttacatga

SEQ ID NO: 78317 - DNA, 110 bp, synthetic construct
  source 1..110: mol_type = other DNA
ggttaaggatatggcatttctgtgagctgtggtgtacatcacagacccagctaggatctggtgttgctgtggctgcaatgtaggctggtagctgcagctccgatttgacc

SEQ ID NO: 78318 - DNA, 110 bp, synthetic construct; identical to SEQ ID NO: 78317
  source 1..110: mol_type = other DNA

SEQ ID NO: 78319 - DNA, 110 bp, synthetic construct
  source 1..110: mol_type = other DNA
gcaaagaggctagcatatactaaattctctataccagtatgttgaacttagatgaattgtcaggccctgttctatttacccaaaagtttttgcccaaaaagtccagtgaa

SEQ ID NO: 78320 - DNA, 110 bp, synthetic construct
  source 1..110: mol_type = other DNA
cacaaatgtaagcagtattaaagtcagatcaaagcatactatgtcatgtatacatccaggctagtctatgacctgattgtaaatttttctatgcctccgaaacaagtagg

SEQ ID NO: 78321 - DNA, 110 bp, synthetic construct
  source 1..110: mol_type = other DNA
tggaactgtggctcatcgaagaaaactggttcccaactcaattaaaggaaaaaatattgctttgctcactccagctttttcaaatcacagtttacctagaaatgatgaca

SEQ ID NO: 78322 - DNA, 110 bp, synthetic construct
  source 1..110: mol_type = other DNA
aattgccagtgcatgatgaaggatggatgtcaaggactgcgatggctcgggctaaggaagcactgatggcctgggttcagttagagctctcattcccaggagggagactc

SEQ ID NO: 78323 - DNA, 110 bp, synthetic construct
  source 1..110: mol_type = other DNA
tctatttcagctttgctttaggaccgttctgtgttataattgacgtccttcatatttgcacttgggcactttcccatgtcccacacaccaggatcttgtctccgatgagc

SEQ ID NO: 78324 - DNA, 110 bp, synthetic construct
  source 1..110: mol_type = other DNA
ttgcacttgggcactttcccatgtcccacacaccaggatcttgtctccgatgagcaggcatttacaacgccttttcccctcacgcttctggtggcctctcgatggccttc

SEQ ID NO: 78325 - DNA, 110 bp, synthetic construct
  source 1..110: mol_type = other DNA
tatcactataggaaatggctcactcggttatggaatatttggaaaagttgtttcgccaccccttcattttacctctagagcagaccttcttgataatgaacctcttattt

SEQ ID NO: 78326 - DNA, 110 bp, synthetic construct
  source 1..110: mol_type = other DNA
cctggccccagctccacctaggcaagctactgatctgtcttcagggagggagccatacagcactctgccaaggtgcccttgttaggacttgtccctccctgggacggagt

SEQ ID NO: 78327 - DNA, 110 bp, synthetic construct
  source 1..110: mol_type = other DNA
tattatccttaggcaccaagatacaggtcatcttgattgaagggatgagctgcgaatccagacaaaatagaacacacaaggatgtcccaaacattcagagtctaagacat

SEQ ID NO: 78328 - DNA, 110 bp, synthetic construct
  source 1..110: mol_type = other DNA
cttcttccattgcaaaaagggaatgaacatatagggttgttgtgagaagtagatgagctgatatatataaaacttcaggtcaatatctggcacggagcacatattcaaaa

SEQ ID NO: 78329 - DNA, 110 bp, synthetic construct
  source 1..110: mol_type = other DNA
gatttcctgaccgatgtgatttcttttgcaaacctataagctccctgaagataaggcccaaaccacccaagaatgctcacagtttttgaatgaatcgatttatgtatttt

SEQ ID NO: 78330 - DNA, 110 bp, synthetic construct
  source 1..110: mol_type = other DNA
atgcactttttcgagatgatatagaatgtcagaaactaattatggaagcaatgaagtatcacttactaccagagagacggccatgttacagagccctcggacaaaaccta

SEQ ID NO: 78331 - DNA, 110 bp, synthetic construct
  source 1..110: mol_type = other DNA
gtatcacttactaccagagagacggccatgttacagagccctcggacaaaacctaggaagtcaactgttggtacattatttgcagttggaggaatggattcaacaaaagg

SEQ ID NO: 78332 - DNA, 110 bp, synthetic construct
  source 1..110: mol_type = other DNA
ataactgtacactgtgctggccaagtgtgtggtaggacaggtgctctcaggactattggtgggaatggatctggttgtggcccttctagaaaagcagcttggcaatacta

SEQ ID NO: 78333 - DNA, 110 bp, synthetic construct
  source 1..110: mol_type = other DNA
ttggtgggaatggatctggttgtggcccttctagaaaagcagcttggcaatactaggggtattttgtttttaagttacattctttgagccagtaatctgacttctaggta

SEQ ID NO: 78334 - DNA, 110 bp, synthetic construct
  source 1..110: mol_type = other DNA
cactggagggtcctggtactaaagacaaaaagaaaaagtatttgcaacaaaaacggtagaaaaactataatatcgttcgacaaatgtaaaaacaacttctaatgtttaaa

SEQ ID NO: 78335 - DNA, 110 bp, synthetic construct
  source 1..110: mol_type = other DNA
aggcgtgaacactgtggcttattctcccccctgactcggatgctcctcagaatcacattattctaattgccaactcagagccgtctcattcttcagctcctcaccctccg

SEQ ID NO: 78336 - DNA, 110 bp, synthetic construct
  source 1..110: mol_type = other DNA
cattattctaattgccaactcagagccgtctcattcttcagctcctcaccctccgtggtgtccccagagttggcatctgaagggcatctttcatcctatcttccaccaaa

SEQ ID NO: 78337 - DNA, 110 bp, synthetic construct
  source 1..110: mol_type = other DNA
ctctctctaggagcttagcatcttgagcatatacgtagccggttgttacaacattggatttggctcaaaggtggaagctattcacttagcatcttctgttccaactggaa

SEQ ID NO: 78338 - DNA, 110 bp, synthetic construct
  source 1..110: mol_type = other DNA
gagagcttcagaaaattcagctccccactggaacacctctctctgagttcccctcccacctcccagctcctgccccagcaccaggaggcctgttagccaactggggttag

SEQ ID NO: 78339 - DNA, 110 bp, synthetic construct
  source 1..110: mol_type = other DNA
ccacctcccagctcctgccccagcaccaggaggcctgttagccaactggggttagcgctccaactggactaagtgtgaaacagaggatccaacgtggtgtaaggttattg

SEQ ID NO: 78340 - DNA, 110 bp, synthetic construct
  source 1..110: mol_type = other DNA
gaatctgctgctgccaaccccagaaggctctcctacctcttgaaattcttcttcttctttttttgtagggccacacctgtggcatatagaagttcccaggctggggatca

SEQ ID NO: 78341 - DNA, 110 bp, synthetic construct
  source 1..110: mol_type = other DNA
ctgcgtgtatattaatcagctcttggtacagcagtgcagtgtgaaacaccacccactaaaactcacaggggcagatagcaataatattttttaaatttgctcacgaatcc

SEQ ID NO: 78342 - DNA, 110 bp, synthetic construct
  source 1..110: mol_type = other DNA
ctaaaactcacaggggcagatagcaataatattttttaaatttgctcacgaatccaagggtctgttcgagcagttctgcttcagctctgggttggtggcacttggtcaag

SEQ ID NO: 78343 - DNA, 110 bp, synthetic construct
  source 1..110: mol_type = other DNA
gattgtggatctaacaggaggagagaaagactgtgacgggggacagcttttataggcatgagcactgagtaggaagcagggagaacacgaggaggaaggggagagacaca

SEQ ID NO: 78344 - DNA, 110 bp, synthetic construct
  source 1..110: mol_type = other DNA
aagggtccaagctgtttcaatcctgaagataaggcatcagaacagagtaagagccagtatgaagagctcacacaccctcagcgttgaaatgacacatcactttcctcgag

SEQ ID NO: 78345 - DNA, 110 bp, synthetic construct
  source 1..110: mol_type = other DNA
agtatgaagagctcacacaccctcagcgttgaaatgacacatcactttcctcgagaggttctggaccagatgtaagtttcaaagtaactacaggggagactggaaaacgt

SEQ ID NO: 78346 - DNA, 110 bp, synthetic construct
  source 1..110: mol_type = other DNA
gataattggtaattggttaagtgatatttattcaatctgtggcgcctctgctattgtatctgccttgtttcatttaaaaaatagtctgcattagtaaaagctatattgaa

SEQ ID NO: 78347 - DNA, 110 bp, synthetic construct
  source 1..110: mol_type = other DNA
tctgtggcgcctctgctattgtatctgccttgtttcatttaaaaaatagtctgcattagtaaaagctatattgaaatgattttcttaatgcacttagagctctgctattt

SEQ ID NO: 78348 - DNA, 110 bp, synthetic construct
  source 1..110: mol_type = other DNA
tttacagctgggaagacccttagcaatcagcgaggcctccccacctcatctctgctgtttgtatggataagaaaatgaaatagaagaggatgggctttcccagcatctag

SEQ ID NO: 78349 - DNA, 110 bp, synthetic construct
  source 1..110: mol_type = other DNA
ctggattccagggaacaggtgtgttctccagctgcatactagccttctctcacgtgtccttctcctctgcctggggtacactttgtccccttcttcatctggccagtcct

SEQ ID NO: 78350 - DNA, 110 bp, synthetic construct
  source 1..110: mol_type = other DNA
ctagatttgggtttcccaggcagctccccttgagaactgttgctgctgaagctgcttggcattggcagtttcccagacaaatgcaaagggagacccaggatctgctctcc

SEQ ID NO: 78351 - DNA, 110 bp, synthetic construct
  source 1..110: mol_type = other DNA
tacttaacccgctgtgccacaagagaatgcgttagaataattatttttatctccgtttcgaagatgaagaaaactgaagctgcagaaattaagcaacatatttctcagct

SEQ ID NO: 78352 - DNA, 110 bp, synthetic construct
  source 1..110: mol_type = other DNA
tttcgaagatgaagaaaactgaagctgcagaaattaagcaacatatttctcagctaagaagaggtggagccctggacttcgactctggaaagtctggtcccagagcttga

SEQ ID NO: 78353 - DNA, 110 bp, synthetic construct
  source 1..110: mol_type = other DNA
gctgcttttctgctctttctctagaacagaggatagctctcccgagtcacccaagtgacaagctccctttcctctctctggtcgttcctgagatgtcaccttctcaacag

SEQ ID NO: 78354 - DNA, 110 bp, synthetic construct
  source 1..110: mol_type = other DNA
tgacaagctccctttcctctctctggtcgttcctgagatgtcaccttctcaacaggtcttcctcaccctccaatttaaagctgaatccctctgtgtaatgccctagtctc

SEQ ID NO: 78355 - DNA, 110 bp, synthetic construct
  source 1..110: mol_type = other DNA
agtttggagtcctgaggcagtccctgctctgaaccaggactctcctggtccaaacgttctctcgccaggcactccaagtgcagatggtgaagaacctagcctgcagcaca

SEQ ID NO: 78356 - DNA, 110 bp, synthetic construct
  source 1..110: mol_type = other DNA
ttgtggaaactctaaaagagaagttttactaaactttttgcttggaatggttagtatcttttccaatacacctacccaaatttcaaggagagatttaagttcctcaaaga

SEQ ID NO: 78357 - DNA, 110 bp, synthetic construct
  source 1..110: mol_type = other DNA
aacattgtattcaaatcagttgaaacctggatgcttcaagttaaaaacatattgattcagctggtttatagtacagcaatttaaatttaggctcaaaagctcttttggaa

SEQ ID NO: 78358 - DNA, 110 bp, synthetic construct
  source 1..110: mol_type = other DNA
gaaaacccatcttcctcaaatgtatgagatcttggcagcgaagcagagtcctttactgaagacagacgcctacaagttcagcgtctcgtctgtctttctgcacacttggt

SEQ ID NO: 78359 - DNA, 110 bp, synthetic construct
  source 1..110: mol_type = other DNA
cacttcagttctttaccactgagccatgacaggaactccaacaacttcaaatagtcatacttatgtcctatatttctgtcccgggcctgcaaatgttagcagctagctta

SEQ ID NO: 78360 - DNA, 110 bp, synthetic construct
  source 1..110: mol_type = other DNA
catacttatgtcctatatttctgtcccgggcctgcaaatgttagcagctagcttaagttttaatctctacccagatttaggaagtatttatttatagccccacataaaga

SEQ ID NO: 78361 - DNA, 110 bp, synthetic construct
  source 1..110: mol_type = other DNA
aaagtttttttccaggctctcttttcaggtccattggtctaaatgtctgttttgatgctggcattataatattttgattatcgtagctttttattattctttctcaagct

SEQ ID NO: 78362 - DNA, 110 bp, synthetic construct
  source 1..110: mol_type = other DNA
tgctggcattataatattttgattatcgtagctttttattattctttctcaagctttttactttggacatgcaggcgtcttctgtgatttcacatgaattttagaattgt

SEQ ID NO: 78363 - DNA, 110 bp, synthetic construct
  source 1..110: mol_type = other DNA
gatggcgagtgaaatctcctgccaaagaaaccaaatttggtttcagaagaattagtcattcatgttgactgccatgttttagatacaaccctactgtgtttactgccact

SEQ ID NO: 78364 - DNA, 110 bp, synthetic construct
  source 1..110: mol_type = other DNA
gaggagcctaacttcaactggcttcaagttgcaaaactgtctcctgtcatagagatatggaaagcatatttttcctttgaatacagctaattaactaacacaggttgtca

SEQ ID NO: 78365 - DNA, 110 bp, synthetic construct
  source 1..110: mol_type = other DNA
tatggaaagcatatttttcctttgaatacagctaattaactaacacaggttgtcaccccaattaccaggtcatcataggcaattacagcttgtgatcaatgatgctgtca

SEQ ID NO: 78366 - DNA, 110 bp, synthetic construct
  source 1..110: mol_type = other DNA
aggcccttctccttttaatgtcttgaaaagtgaaaaacgatccttattccccgcaaccccccaagactgtacctatggtacatggaagttcctgggccaggaattgaatc

SEQ ID NO: 78367 - DNA, 110 bp, synthetic construct
  source 1..110: mol_type = other DNA
accccccaagactgtacctatggtacatggaagttcctgggccaggaattgaatctgagctggtctctttaacccactgcaacaggctgaaattgaacccgcacctctgc

SEQ ID NO: 78368 - DNA, 110 bp, synthetic construct
  source 1..110: mol_type = other DNA
tgctttagccaaactactcccaaaagagagacagctggagaattcgctggactgcatggttaagaagtcatgagattgcagagaacaaagaaatgcccatgctgctagtt

SEQ ID NO: 78369 - DNA, 110 bp, synthetic construct
  source 1..110: mol_type = other DNA
tattagctttacatacatggcaaatggcagacatgtcctgtgtcctactcctcgtgtgtgaaagggaactaaaaacagtcttctgtcagctttgaaacgtaaggagtttg

SEQ ID NO: 78370 - DNA, 110 bp, synthetic construct
  source 1..110: mol_type = other DNA
actgaaatcagtgtcatttgaaagcatttatagagcacatattgtaagtcagacactgtgctagtaactctaaatttaaatacagctgcctggattgcccttggaagtac

SEQ ID NO: 78371 - DNA, 110 bp, synthetic construct
  source 1..110: mol_type = other DNA
ctgtgctagtaactctaaatttaaatacagctgcctggattgcccttggaagtacttcaaattcttttgcatgaatgagccatgacctccccagggaaatcagtttgcaa

SEQ ID NO: 78372 - DNA, 110 bp, synthetic construct; identical to SEQ ID NO: 78370
  source 1..110: mol_type = other DNA

SEQ ID NO: 78373 - DNA, 110 bp, synthetic construct; identical to SEQ ID NO: 78371
  source 1..110: mol_type = other DNA

SEQ ID NO: 78374 - DNA, 110 bp, synthetic construct
  source 1..110: mol_type = other DNA
ttagattgtactgcttttaaaagtcaatgatcacactaagattctgaagcaaagagtgctgtatctgaggagctgcctgacatgggcagcggggaggagtggtagagaat

SEQ ID NO: 78375 - DNA, 110 bp, synthetic construct
  source 1..110: mol_type = other DNA
gtgctgtatctgaggagctgcctgacatgggcagcggggaggagtggtagagaataaaacacactcatgccatgtgtatgccatccctgctcccagatttctggcttggg

SEQ ID NO: 78376 - DNA, 110 bp, synthetic construct; identical to SEQ ID NO: 78374
  source 1..110: mol_type = other DNA

SEQ ID NO: 78377 - DNA, 110 bp, synthetic construct; identical to SEQ ID NO: 78375
  source 1..110: mol_type = other DNA

SEQ ID NO: 78378 - DNA, 110 bp, synthetic construct
  source 1..110: mol_type = other DNA
caatcatttataggatactacaaagtgcactgacttactaggctttgcttgatacaggactacagaatgtgactcaacaaatgtttgggagaatcttactgaccaagtgc

SEQ ID NO: 78379 - DNA, 110 bp, synthetic construct
  source 1..110: mol_type = other DNA
aggactacagaatgtgactcaacaaatgtttgggagaatcttactgaccaagtgcatcttctttgtctgttccctgagttactggtgaggatggttccttaacctcttgc

SEQ ID NO: 78380 - DNA, 110 bp, synthetic construct
  source 1..110: mol_type = other DNA
gcaagccagcctcagctagctttggcagcaaagggacaggcaccattactctacggtggtagcgtccagtcccaactttacaggacttcattcatgaaaacaggccagat

SEQ ID NO: 78381 - DNA, 110 bp, synthetic construct
  source 1..110: mol_type = other DNA
ctctccgattagggtttctgaccgaggctcagcttcttcctcctcaccccagggccaacccaggggacccactccccatccctttacctcctataaccactggggcacct

SEQ ID NO: 78382 - DNA, 110 bp, synthetic construct
  source 1..110: mol_type = other DNA
caacccaggggacccactccccatccctttacctcctataaccactggggcacctgggagggagcagtgattgaaaaaaaaaatcttggcgttcccttcgttgtggctca

SEQ ID NO: 78383 - DNA, 110 bp, synthetic construct
  source 1..110: mol_type = other DNA
gaagttccttacacaggaggatggggacagcggagtggggaggcccactggccatgggaggaggagagcagaaccagctttgctctgagccaggactatcctagtagcaa

SEQ ID NO: 78384 - DNA, 110 bp, synthetic construct; identical to SEQ ID NO: 78383
  source 1..110: mol_type = other DNA

SEQ ID NO: 78385 - DNA, 110 bp, synthetic construct
  source 1..110: mol_type = other DNA
agcatctttctcttctggtggtcgccaggaaaggaggtgatcctgattcctgcagtttttggacttttgtaagcgaccccagtatctttctagtgaatcctctttcatta

SEQ ID NO: 78386 - DNA, 110 bp, synthetic construct
  source 1..110: mol_type = other DNA
gtgcagccgccaagcggggctggcaggaggtggggaggctgctctgagggcacttggcctctgccagttggatcgatggctcgtctggaacaggaagaactccagaacaa

SEQ ID NO: 78387 - DNA, 110 bp, synthetic construct
  source 1..110: mol_type = other DNA
tttgtagtgacatttcttttcttttttcccccagccatataacattgttgactccttttgagttcagccaaaacctgttcttcttacctacttgtgttgcgattaagcca

SEQ ID NO: 78388 - DNA, 110 bp, synthetic construct; identical to SEQ ID NO: 78387
  source 1..110: mol_type = other DNA

SEQ ID NO: 78389 - DNA, 110 bp, synthetic construct
  source 1..110: mol_type = other DNA
agcctagagagactaacactctttccatttttattctctttattaattcagctaatttgtagtgacatttcttttcttttttcccccagccatataacattgttgactcc

SEQ ID NO: 78390 - DNA, 110 bp, synthetic construct; identical to SEQ ID NO: 78387
  source 1..110: mol_type = other DNA

SEQ ID NO: 78391 - DNA, 110 bp, synthetic construct
  source 1..110: mol_type = other DNA
aacatagccctggttctccaagagctcacagatgatgtctatacagtaagtgatgtggtccaggtagcaccaggcactgtcgagatagaaatgagacatccaacccagcc

SEQ ID NO: 78392 - DNA, 110 bp, synthetic construct
  source 1..110: mol_type = other DNA
gaaccctgggctatttgtctggcctggggaccattcgtgatgaacttctggatacagtttttacaacaagggtgaaaagagacgtctctgtctctctctctgtttctttg

SEQ ID NO: 78393 - DNA, 110 bp, synthetic construct
  source 1..110: mol_type = other DNA
agtttttacaacaagggtgaaaagagacgtctctgtctctctctctgtttctttgttcatgaaggatgaaactggtacccccttctgccccactgaattttggtagctct

SEQ ID NO: 78394 - DNA, 110 bp, synthetic construct
  source 1..110: mol_type = other DNA
cggtttgggtgttttttgtttgtttatttttatctctttaaggccacacccgctgcatacagaggtacacagtctaggggtcgaattagagctgtagctgccagcctaca

SEQ ID NO: 78395 - DNA, 110 bp, synthetic construct; identical to SEQ ID NO: 78394
  source 1..110: mol_type = other DNA

SEQ ID NO: 78396 - DNA, 110 bp, synthetic construct
  source 1..110: mol_type = other DNA
atcctcataatcatccatagggcttcctttaatggacaacttaaggtcataagttatacaaagtctagactcggtcatgctcaaggaatgatttaaaagagatttaggtg

SEQ ID NO: 78397 - DNA, 110 bp, synthetic construct
  source 1..110: mol_type = other DNA
cttctaggaagtcattcaattatgaaggcagagcccttgcgaaagagagtattgcccttacaggtccctagagagctccctcgtcctttccgtaatgtgaggacataaca

SEQ ID NO: 78398 - DNA, 110 bp, synthetic construct
  source 1..110: mol_type = other DNA
ccttacaggtccctagagagctccctcgtcctttccgtaatgtgaggacataacaaaaaatatctatgaatcagggagggtgatgccagacactgaatctgccggagcct

SEQ ID NO: 78399 - DNA, 110 bp, synthetic construct
  source 1..110: mol_type = other DNA
gggaactccaaaatatatcactttctgagcagaggttttcaaagccctcatgaagttccacctcatctctctttctcttgcttgctctcctttttaaatttttgggccac

SEQ ID NO: 78400 - DNA, 110 bp, synthetic construct
  source 1..110: mol_type = other DNA
ttccacctcatctctctttctcttgcttgctctcctttttaaatttttgggccaccccatggcatacggaatcccagacaagggatcaaatcagtagcagcttcagcaaa

SEQ ID NO: 78401 - DNA, 110 bp, synthetic construct; identical to SEQ ID NO: 78399
  source 1..110: mol_type = other DNA

SEQ ID NO: 78402 - DNA, 110 bp, synthetic construct; identical to SEQ ID NO: 78400
  source 1..110: mol_type = other DNA

SEQ ID NO: 78403 - DNA, 110 bp, synthetic construct
  source 1..110: mol_type = other DNA
gaagagagaagtcatccatggcttcgttttcgctacagacaaattaactagaccacacagtgtagtaggtgctcagtaactgcttatcatattgcaatcaaggcagaata

SEQ ID NO: 78404 - DNA, 110 bp, synthetic construct
  source 1..110: mol_type = other DNA
cacagtgtagtaggtgctcagtaactgcttatcatattgcaatcaaggcagaatagcctttgaaaatgacgacaatgtgtaagttataccaatggattcagagaaaaatg

SEQ ID NO: 78405 - DNA, 110 bp, synthetic construct
  source 1..110: mol_type = other DNA
tgtgttcatccaagacctagttgtgttcatctaagacctagttctaggctggttctgggggcagggattgttgctgcaaaaactgaggtgttttttctgctgattgggac

SEQ ID NO: 78406 - DNA, 110 bp, synthetic construct
  source 1..110: mol_type = other DNA
tgggggcagggattgttgctgcaaaaactgaggtgttttttctgctgattgggacctaggctgcctctgagacagacctgtcccaggacatttcttccccagatttggct

SEQ ID NO: 78407 - DNA, 110 bp, synthetic construct
  source 1..110: mol_type = other DNA
gagagagtggagagctacaaaagaaaagtgtacttcctgggagcttcatatccactgcttatgtcaagaatatcttcctatccactgctcgtgtcatcaccttgcaaggt

SEQ ID NO: 78408 - DNA, 110 bp, synthetic construct
  source 1..110: mol_type = other DNA
ggcctgcatgccgaccccttcattgacagctcaatcattcctgtgttcatccatcaaactctcacctgctccctgtccctggactctgactagcagcctgggacacgagg

SEQ ID NO: 78409 - DNA, 110 bp, synthetic construct
  source 1..110: mol_type = other DNA
cattcctgtgttcatccatcaaactctcacctgctccctgtccctggactctgactagcagcctgggacacgaggtccccagcacactccccacagggggcagctgtggt

SEQ ID NO: 78410 - DNA, 110 bp, synthetic construct
  source 1..110: mol_type = other DNA
tctctttctccacatcctcaccaacacattatttctggcctttttgatatagccatttctaataggaatgaggtaatatctcgttgtggttttagtttgcatttccctaa

SEQ ID NO: 78411 - DNA, 110 bp, synthetic construct
  source 1..110: mol_type = other DNA
cctcaccaacacattatttctggcctttttgatatagccatttctaataggaatgaggtaatatctcgttgtggttttagtttgcatttccctaataattagtgatgttg

SEQ ID NO: 78412 - DNA, 110 bp, synthetic construct
  source 1..110: mol_type = other DNA
aagacccagaactccctcagaaatcagatatgtcgcaaactcagggaacctaatcctggatggagctgaaggatgtggagaagtgagcttgctgcacacagaatggtgaa

SEQ ID NO: 78413 - DNA, 110 bp, synthetic construct
  source 1..110: mol_type = other DNA
ctggatggagctgaaggatgtggagaagtgagcttgctgcacacagaatggtgaacgtttttggacagagactccctgtaatgataaatcatttcttctgctccttaaat

SEQ ID NO: 78414 - DNA, 110 bp, synthetic construct
  source 1..110: mol_type = other DNA
attcttaaattttgtatctgtattttacatcctatgttataggtataagagcactgtcaacttgattgttgggggatgaaatctttaatgtatagctcagcattccttcc

SEQ ID NO: 78415 - DNA, 110 bp, synthetic construct
  source 1..110: mol_type = other DNA
gtcaacttgattgttgggggatgaaatctttaatgtatagctcagcattccttccaagactgatcagtcctctgaaggtagaaaaacccattttcagccaactattactt

SEQ ID NO: 78416 - DNA, 110 bp, synthetic construct
  source 1..110: mol_type = other DNA
agagtcatactttttttgaaagtattctctatggcttgcccttaaattctaagctcctcttttatgattgattttcctaatataatatattcctgctgtaggtttaaacc

SEQ ID NO: 78417 - DNA, 110 bp, synthetic construct; identical to SEQ ID NO: 78416
  source 1..110: mol_type = other DNA

SEQ ID NO: 78418 - DNA, 110 bp, synthetic construct
  source 1..110: mol_type = other DNA
tggcataggtcgcagatgtggctagtatccggtggtgctgtggctgtggtgtgatccacagctgcagctctggtttgacctctagccagggaacttccatatgcagcagg

SEQ ID NO: 78419 - DNA, 110 bp, synthetic construct; identical to SEQ ID NO: 78418
  source 1..110: mol_type = other DNA

SEQ ID NO: 78420 - DNA, 110 bp, synthetic construct
  source 1..110: mol_type = other DNA
actcagtttattaaagtgtagctcttccattccccacttcctgtcaccgaacttgctcataaaaacctgaagatgaattcttgatacatcactctgaaggaattatggta

SEQ ID NO: 78421 - DNA, 110 bp, synthetic construct
  source 1..110: mol_type = other DNA
gtcttgtgttcttgcatgcttattcttgcaagtcttggcaaaatgctgaactcctcacaagttattgcagtgcccaagggcatgctttccaagcttgatcttctggccat

SEQ ID NO: 78422 - DNA, 110 bp, synthetic construct
  source 1..110: mol_type = other DNA
cacaagttattgcagtgcccaagggcatgctttccaagcttgatcttctggccatctatcaagagagttaagtatagacaaatctccctgcacttctgcccagccttgcc

SEQ ID NO: 78423 - DNA, 110 bp, synthetic construct
  source 1..110: mol_type = other DNA
ataactttgtggctttctgacagcactagtaagatatgtcttctttcatgttgaactttcataacctagtcataaaatatttaattttcctcaagatatttgaaggccta

SEQ ID NO: 78424 - DNA, 110 bp, synthetic construct; identical to SEQ ID NO: 78423
  source 1..110: mol_type = other DNA

SEQ ID NO: 78425 - DNA, 110 bp, synthetic construct
  source 1..110: mol_type = other DNA
cacatttaaagggtatccaccataaatttttatgttgtacaggaagaaaagtgggtaatattccaaacaggtaataactttaaaaattgtatggaaatggatggcacaaa

SEQ ID NO: 78426 - DNA, 110 bp, synthetic construct
  source 1..110: mol_type = other DNA
taatattccaaacaggtaataactttaaaaattgtatggaaatggatggcacaaatgtgcttgtgtggcttatttggatacacacagcagtaaaattcatcacttaggaa

SEQ ID NO: 78427 - DNA, 110 bp, synthetic construct; identical to SEQ ID NO: 78425
  source 1..110: mol_type = other DNA

SEQ ID NO: 78428 - DNA, 110 bp, synthetic construct; identical to SEQ ID NO: 78426
  source 1..110: mol_type = other DNA

SEQ ID NO: 78429 - DNA, 110 bp, synthetic construct
  source 1..110: mol_type = other DNA
gttatttaccttaggaaactcactctcttgcatgggataaagtgggagatataataacatcaaaggttaactattttaaaggctccctgtggtttttctttttctgttac

SEQ ID NO: 78430 - DNA, 110 bp, synthetic construct
  source 1..110: mol_type = other DNA
aacatcaaaggttaactattttaaaggctccctgtggtttttctttttctgttaccacaggaaatcatctgctggatttttggtccatttattgtgctttcctttgagaa

SEQ ID NO: 78431 - DNA, 110 bp, synthetic construct
  source 1..110: mol_type = other DNA
tgtaagacaataatttcttttgtttcaaatcactcagataggtgtactttgttaaggcagccgtacgaatttagtacagatattttcctattcccaaggcatactctgtg

SEQ ID NO: 78432 - DNA, 110 bp, synthetic construct
  source 1..110: mol_type = other DNA
ggcagccgtacgaatttagtacagatattttcctattcccaaggcatactctgtgctttacatgtctttgattctggtcccctgatagaagtttcatccaagtttttcat

SEQ ID NO: 78433 - DNA, 110 bp, synthetic construct
  source 1..110: mol_type = other DNA
agaaactccatatcttgccatctaaaaatgtgagcctggtataaaagaggttttttctaacaaaagtcattaatttgaatacatgcaccccaatgttcatagcagcacta

SEQ ID NO: 78434 - DNA, 110 bp, synthetic construct; identical to SEQ ID NO: 78433
  source 1..110: mol_type = other DNA

SEQ ID NO: 78435 - DNA, 110 bp, synthetic construct
  source 1..110: mol_type = other DNA
ttcagagtcttcctatgaggtctctgttctgatttaccatatctttctcatcagcatgaaatggactaaaagtaaagatagaaaaccacttctttgataaagctactttc

SEQ ID NO: 78436 - DNA, 110 bp, synthetic construct
  source 1..110: mol_type = other DNA
tctcatcagcatgaaatggactaaaagtaaagatagaaaaccacttctttgataaagctactttccacatatcaaaaaaaaaaatcttcttccagtgaggattgaaaaag

SEQ ID NO: 78437 - DNA, 110 bp, synthetic construct
  source 1..110: mol_type = other DNA
aggaatggaaggtcatgacatcaggaccaacaaccctgccctgagacataccgaggctggttgtgtccctagctggagtcagaagggcctgtccacaaagccctctctct

SEQ ID NO: 78438 - DNA, 110 bp, synthetic construct
  source 1..110: mol_type = other DNA
gctggttgtgtccctagctggagtcagaagggcctgtccacaaagccctctctctgtggtcctgacaaatgctccttctccttgcctttcaagcctgtgggtggtaagca

SEQ ID NO: 78439 - DNA, 110 bp, synthetic construct
  source 1..110: mol_type = other DNA
aggtcacagatgcgactgggatcccacgttgttgtggctgtgtataggctagcagctatagctctgattcgaaccctagcccaggaactttcatatgccacaggtatggc

SEQ ID NO: 78440 - DNA, 110 bp, synthetic construct; identical to SEQ ID NO: 78439
  source 1..110: mol_type = other DNA

SEQ ID NO: 78441 - DNA, 110 bp, synthetic construct
  source 1..110: mol_type = other DNA
cagaaagtaccaatgaacagccccaaatagtaaggggaggccagggtatatgtgatttggtgaaggggatgggcagtcaagtacacatctctgtagaaggtcactgctgg

SEQ ID NO: 78442 - DNA, 110 bp, synthetic construct
  source 1..110: mol_type = other DNA
agagccccagagatagttcccagctcccaggagcactatcatgggctcttcaccgtcagctccttcagagatgcctcagctggcagggctgtctctcccaaggccttgtc

SEQ ID NO: 78443 - DNA, 110 bp, synthetic construct
  source 1..110: mol_type = other DNA
acaatcctcatttctttttattcttttccatggcattgatttccactcctctgtcttccacctcactaattcatctctgcctcagctattgtgctattgattccttctag

SEQ ID NO: 78444 - DNA, 110 bp, synthetic construct
  source 1..110: mol_type = other DNA
ttccacctcactaattcatctctgcctcagctattgtgctattgattccttctagtgtagttttccttttggttattgtattattcatttttgtttgttgttccttaaat

SEQ ID NO: 78445 - DNA, 110 bp, synthetic construct
  source 1..110: mol_type = other DNA
ttaccatatgatctagcaattccagttctgggcatctatctggagaaaactgtaacttgaaaacttatatgcaccctaaatttcttggcagcactctttacagtaggtaa

SEQ ID NO: 78446 - DNA, 110 bp, synthetic construct; identical to SEQ ID NO: 78445
  source 1..110: mol_type = other DNA

SEQ ID NO: 78447 - DNA, 110 bp, synthetic construct
  source 1..110: mol_type = other DNA
ggaaacttcaaggtgctccacttgaagccctcaccacaggactcatgaaggatcagaagatataccctccctccaatcctgacaattgtggacaccacaaacaagatggc

SEQ ID NO: 78448 - DNA, 110 bp, synthetic construct
  source 1..110: mol_type = other DNA
gaagatataccctccctccaatcctgacaattgtggacaccacaaacaagatggctctggtccagggaaacacactaacagccagcacccaaaaagacagtgcttgtgtt

SEQ ID NO: 78449 - DNA, 110 bp, synthetic construct
  source 1..110: mol_type = other DNA
cctgtgagatctggctcccctttccccaagccccagcaaggctatctgcctgctaccttgtcactcagaggcttccaaagcaagatgatatacctctgtacctttgttcc

SEQ ID NO: 78450 - DNA, 110 bp, synthetic construct
  source 1..110: mol_type = other DNA
ccttgtcactcagaggcttccaaagcaagatgatatacctctgtacctttgttccagctgtctactccatctaaatacccagtcagcctgtctacctcctccaagtatgt

SEQ ID NO: 78451 - DNA, 110 bp, synthetic construct; identical to SEQ ID NO: 78449
  source 1..110: mol_type = other DNA

SEQ ID NO: 78452 - DNA, 110 bp, synthetic construct; identical to SEQ ID NO: 78450
  source 1..110: mol_type = other DNA

SEQ ID NO: 78453 - DNA, 110 bp, synthetic construct
  source 1..110: mol_type = other DNA
gaggtcttggacactgaggctccaccagcttcacacttttgctttattgactcaggtgtcaagagggatttctctggggaaacaatgaacttcctgccaaaatcatctcg

SEQ ID NO: 78454 - DNA, 110 bp, synthetic construct
  source 1..110: mol_type = other DNA
ctggagcatggaggcgcggtctcttcccatggccagagaacaggcaggtagggggaaagttctctgtcgctaaatcagggaagattctgtactctgtcctcaaaccatca

SEQ ID NO: 78455 - DNA, 110 bp, synthetic construct
  source 1..110: mol_type = other DNA
acagcaggtccttctgtccatagaacctcttaccttcttgtgtgtgatgtacatataagctggggatttgttttaaagttctgaatttgaatctcattgctttaatttgt

SEQ ID NO: 78456 - DNA, 110 bp, synthetic construct
  source 1..110: mol_type = other DNA
tcattaatgcagaaccattttaatagcttcctataaactcagcgtatgatatgtgtatagtctttattgtgatacatttactcgtttgtgtgtgtttgttttgaccacat

SEQ ID NO: 78457 - DNA, 110 bp, synthetic construct
  source 1..110: mol_type = other DNA
tatagtctttattgtgatacatttactcgtttgtgtgtgtttgttttgaccacatctacagcatgcagaagttcccagcccagggactggactgtaccacagctgtaacc

SEQ ID NO: 78458 - DNA, 110 bp, synthetic construct
  source 1..110: mol_type = other DNA
tagctcatactcatatggtcaattgattatctgtaaaagtgccaaggtaattcaatggagaaaaaaagtttttttcaacaagtggtgccgagacaattggatatcaatgt

SEQ ID NO: 78459 - DNA, 110 bp, synthetic construct
  source 1..110: mol_type = other DNA
ggtaattcaatggagaaaaaaagtttttttcaacaagtggtgccgagacaattggatatcaatgtgtaagagaatgaacttagactcatacttaacaccacataaaaaaa

SEQ ID NO: 78460 - DNA, 110 bp, synthetic construct
  source 1..110: mol_type = other DNA
caaatattttaaaggtgcagtgtagactttccttcatcaaggcttaggctgtgagctttagagagacactagcaatccctttatgtttttataaatgacttccagttttc

SEQ ID NO: 78461 - DNA, 110 bp, synthetic construct
  source 1..110: mol_type = other DNA
ctttagagagacactagcaatccctttatgtttttataaatgacttccagttttcccaaccatgaatggtttctgtttctgtcttccagccttttcttctctggggatgt

SEQ ID NO: 78462 - DNA, 110 bp, synthetic construct
  source 1..110: mol_type = other DNA
aagcaagttacttaatctctcaaaatctcaatttatctgtaaagtggaggtaataatagaattttatacacataatgtggctatgaaaaccttttgcacagtgcctgata

SEQ ID NO: 78463 - DNA, 110 bp, synthetic construct
  source 1..110: mol_type = other DNA
catggccttaggagttgtgctggtatatggcctcctccacgtgtttccagggatatggaggcaatgggcagattttatagccattccgtggttgctggattcttgacagt

SEQ ID NO: 78464 - DNA, 110 bp, synthetic construct
  source 1..110: mol_type = other DNA
tggaggcaatgggcagattttatagccattccgtggttgctggattcttgacagtgatgaatattccatggcaaggtggcacagaccgctcctggttgtaggaccctggg

SEQ ID NO: 78465 - DNA, 110 bp, synthetic construct
  source 1..110: mol_type = other DNA
aaaaaaacatctgactaatactgataatggtccattacatagagaggaatgaggtttcattgtgctaagccagtgcaattctaaggtttgtttatgatattaagctagaa

SEQ ID NO: 78466 - DNA, 110 bp, synthetic construct
  source 1..110: mol_type = other DNA
ttcattgtgctaagccagtgcaattctaaggtttgtttatgatattaagctagaagtaccattaagcatgtgataccctaactattccaacagtagtgctcaccactgtc

SEQ ID NO: 78467 - DNA, 110 bp, synthetic construct; identical to SEQ ID NO: 78465
  source 1..110: mol_type = other DNA

SEQ ID NO: 78468 - DNA, 110 bp, synthetic construct; identical to SEQ ID NO: 78466
  source 1..110: mol_type = other DNA

SEQ ID NO: 78469 - DNA, 110 bp, synthetic construct
  source 1..110: mol_type = other DNA
aagatataccttttgcagttaagtaatgaattggaatctgctttatatatcattatcttgttcattagcatggttcagccttttcaggccaaatccagtctggctgtacc

SEQ ID NO: 78470 - DNA, 110 bp, synthetic construct
  source 1..110: mol_type = other DNA
tcttgttcattagcatggttcagccttttcaggccaaatccagtctggctgtacccacaaatagtttcaaatctagaaacattgaggaccagatcttggctaatgatgat

SEQ ID NO: 78471 - DNA, 110 bp, synthetic construct
  source 1..110: mol_type = other DNA
ggagactagtggtcataaggcttttaaaagctactggcactaaagtaaatggttaacactttcatctgtatggtgaataaactttggtattaacagcccttataaatatc

SEQ ID NO: 78472 - DNA, 110 bp, synthetic construct
  source 1..110: mol_type = other DNA
aataaccttttctaaaaaaaataaccatgttgtgtaataaattactggcctgtaatgtttaagaggcatcactcaggatttcttttttcactgagggtcacagctgcaac

SEQ ID NO: 78473 - DNA, 110 bp, synthetic construct
  source 1..110: mol_type = other DNA
accattaaacaataagatttgggtgagactcaaatattaacaaagaaaaagcttcttgaggatatgagggagtaacaggtgcaaggaccctggaacaaacaaacttggct

SEQ ID NO: 78474 - DNA, 110 bp, synthetic construct
  source 1..110: mol_type = other DNA
agcctgtgggttgggattgcttcacagttccacttgatatgccacattgtctccaaagtttaatttacatctatcttagtagctgagtgaactttacaaaaagaaaaaat

SEQ ID NO: 78475 - DNA, 110 bp, synthetic construct
  source 1..110: mol_type = other DNA
aaatgagagggagacaatgtcacagctcttcaaaaacttgaatacacttgacagtggtgtatctcacccatctcactgtagtatgtttttcagggtcctagcacttgtat

SEQ ID NO: 78476 - DNA, 110 bp, synthetic construct
  source 1..110: mol_type = other DNA
tattcctccagaggcattgtagatttaatcacctgttaatagctggtcaaggaaattaatcacttttatttggaacttggaatacattgggaaaatgccactagaaaaat

SEQ ID NO: 78477 - DNA, 110 bp, synthetic construct
  source 1..110: mol_type = other DNA
tctttttagacaaaaagacataaattacagctatttatttgtgagattgcacatattttaatgctatggatttttcagtatggtaacagaattgctaggccgtaggcaga

SEQ ID NO: 78478 - DNA, 110 bp, synthetic construct; identical to SEQ ID NO: 78477
  source 1..110: mol_type = other DNA

SEQ ID NO: 78479 - DNA, 110 bp, synthetic construct
  source 1..110: mol_type = other DNA
tcaaagtatctgaaaaacaactcaggaaacttgcattagatactgttacccaggtccttcagagaggagctaaagcagagaacgaggggcaggggtctgtcctgagaagg

SEQ ID NO: 78480 - DNA, 110 bp, synthetic construct
  source 1..110: mol_type = other DNA
ccttcagagaggagctaaagcagagaacgaggggcaggggtctgtcctgagaaggcctcatagagtcctgctcagttatgattggtcttctggttttaacctgcattatt

SEQ ID NO: 78481 - DNA, 110 bp, synthetic construct; identical to SEQ ID NO: 78479
  source 1..110: mol_type = other DNA

SEQ ID NO: 78482 - DNA, 110 bp, synthetic construct; identical to SEQ ID NO: 78480
  source 1..110: mol_type = other DNA

SEQ ID NO: 78483 - DNA, 110 bp, synthetic construct
  source 1..110: mol_type = other DNA
gaggcagcttatcaattcccttctccttggggaaggagaatatatcactgattcagcagctgctggcctggataggagtcatgtaacagtaaataagcacagaaggctgc

SEQ ID NO: 78484 - DNA, 110 bp, synthetic construct
  source 1..110: mol_type = other DNA
gcagctgctggcctggataggagtcatgtaacagtaaataagcacagaaggctgcatgagaatctctattataaacacatcctttacatagtggcatttacactcttctt

SEQ ID NO: 78485 - DNA, 110 bp, synthetic construct
  source 1..110: mol_type = other DNA
atggtgacacacataaaggcagtatttttagggagcattaagttaaaggtgtttgaggctaatagctgtcagcttgactagcatattgaactctgaggccactgatacct

SEQ ID NO: 78486 - DNA, 110 bp, synthetic construct
  source 1..110: mol_type = other DNA
aggctaatagctgtcagcttgactagcatattgaactctgaggccactgataccttgacacatctgtaattcataacctttagaccagtttgccatactttgcggtgatc

SEQ ID NO: 78487 - DNA, 110 bp, synthetic construct; identical to SEQ ID NO: 78485
  source 1..110: mol_type = other DNA

SEQ ID NO: 78488 - DNA, 110 bp, synthetic construct; identical to SEQ ID NO: 78486
  source 1..110: mol_type = other DNA

SEQ ID NO: 78489 - DNA, 110 bp, synthetic construct
  source 1..110: mol_type = other DNA
gctaaggctctggaaatttatcaattgtcagagttaagtgggggtgaatggaaagtaactagtatttctgagtgcctattacatggcagatgctttatgcatatagtgtt

SEQ ID NO: 78490 - DNA, 110 bp, synthetic construct
  source 1..110: mol_type = other DNA
tccaaatgcaatagtttgcagctattaaccctagattcccagatcatcccactccctcccctcccctcttggctgtggagtaggccagcagctgaagctctgatttgacc

SEQ ID NO: 78491 - DNA, 110 bp, synthetic construct; identical to SEQ ID NO: 78490
  source 1..110: mol_type = other DNA

SEQ ID NO: 78492 - DNA, 110 bp, synthetic construct
  source 1..110: mol_type = other DNA
ataatctctaatgcaattaaaagaactgatcctcttttagatgggaatcctaagactgtctgaatcatatgtattctttcccattgatctaacctgattatgttcatagc

SEQ ID NO: 78493 - DNA, 110 bp, synthetic construct
  source 1..110: mol_type = other DNA
ctgtctgaatcatatgtattctttcccattgatctaacctgattatgttcatagccctaaaactgcattcagtttttgctcacaccagctgactaccacacgcagttctc

SEQ ID NO: 78494 - DNA, 110 bp, synthetic construct
  source 1..110: mol_type = other DNA
tgctaatcgagacaggtacttgggaaagagagaagtatcaacaacataaagctggtatattccctatggttgtcaataatccaggctactccaatataccactgccactg

SEQ ID NO: 78495 - DNA, 110 bp, synthetic construct
  source 1..110: mol_type = other DNA
gactttcaaaaatataattgatgatgatgatgatgtgacagtgttatgtgtacttttccttagtccttgacattatagctttcattgttctgcctacatgtaatggagta

SEQ ID NO: 78496 - DNA, 110 bp, synthetic construct
  source 1..110: mol_type = other DNA
tcccaacagttaacatttctgggttgtgcttggagaaacataagatgagctatctaaagcctataggaaatagtttttcccaatatttcctagttactatttgagaggca

SEQ ID NO: 78497 - DNA, 110 bp, synthetic construct
  source 1..110: mol_type = other DNA
aaagcctataggaaatagtttttcccaatatttcctagttactatttgagaggcagtgttaagtagtacattgtcttttaaactgtgctctaggtgcttcctctaaaggg

SEQ ID NO: 78498 - DNA, 110 bp, synthetic construct
  source 1..110: mol_type = other DNA
tctggcttgtgttctagaacagtttggccatatagcataagaaaaattagaaggcactgatgaacagtgtcacggggcaaaaaaccgaatccgtggactacctcttttag

SEQ ID NO: 78499 - DNA, 110 bp, synthetic construct
  source 1..110: mol_type = other DNA
ccctcatggcaacaatcagatcagctgagtaacagctgccccttttgttacccgtttttttctcttgatgagcacaccgtctcttgtctttcatttcctactcctttcct

SEQ ID NO: 78500 - DNA, 110 bp, synthetic construct
  source 1..110: mol_type = other DNA
ggagaaccaagatgcagaaagaggaaagaggccgaaatcagtagctttgagaagtattttgaatagccacccaaatacacagtgaagccgacacgagccacatacaaatt

SEQ ID NO: 78501 - DNA, 110 bp, synthetic construct
  source 1..110: mol_type = other DNA
ataaccttcaaatatttagacttatggtatataggcttccacatgtgtattgctcggggtccctcaaatgtaactagggtcatggccatgagtatggcggagatggccct

SEQ ID NO: 78502 - DNA, 110 bp, synthetic construct
  source 1..110: mol_type = other DNA
ggggtccctcaaatgtaactagggtcatggccatgagtatggcggagatggccctgccactgtcacatccacttaacattctcacttaactatggggtttttgcaaccca

SEQ ID NO: 78503 - DNA, 110 bp, synthetic construct
  source 1..110: mol_type = other DNA
agttcctggttggatttttttaactgatgagccacaacaggaactcctagtatatttcttaatccatgtccctctagtgatttcagccatttcctcttattatcacattt

SEQ ID NO: 78504 - DNA, 110 bp, synthetic construct
  source 1..110: mol_type = other DNA
ttcttaatccatgtccctctagtgatttcagccatttcctcttattatcacatttgttggcatacaattgctgttagtattttcttacaatcctttttatttgtctaaga

SEQ ID NO: 78505 - DNA, 110 bp, synthetic construct
  source 1..110: mol_type = other DNA
tgggtgaggaaatttaaaatcccaatagtttcgaatgagccacatgtcagctttccccattgtctcaaatattgtggtgggcattcctgaaagataaagcaaagcagtaa

SEQ ID NO: 78506 - DNA, 110 bp, synthetic construct
  source 1..110: mol_type = other DNA
cccattgtctcaaatattgtggtgggcattcctgaaagataaagcaaagcagtaactaaagttagatgaaatgagaatatagtcatgtgcattcattagataaattttgg

SEQ ID NO: 78507 - DNA, 110 bp, synthetic construct
  source 1..110: mol_type = other DNA
tgaacaggcaacctcttggttcccagtcggatttgtttctgctctgccgctacaggaactccagtaatggcaaatttaactcgttaaccttactccccagctaacccatt

SEQ ID NO: 78508 - DNA, 110 bp, synthetic construct
  source 1..110: mol_type = other DNA
gaactccagtaatggcaaatttaactcgttaaccttactccccagctaacccattcttgtgctagattcccttacatacctcatatgttggggattccacattcactcca

SEQ ID NO: 78509 - DNA, 110 bp, synthetic construct
  source 1..110: mol_type = other DNA
aataaaagtgctgcccatgcaacctcagggtgaattgtagttatctacgtctgtaatcttaccacccaccaggctctgtccattgaatatgaaaaaacatgatatagagc

SEQ ID NO: 78510 - DNA, 110 bp, synthetic construct
  source 1..110: mol_type = other DNA
atcttaccacccaccaggctctgtccattgaatatgaaaaaacatgatatagagccatgtctgacaaaagcttggaatgtctatgtgtgttttggctgccactcttgttg

SEQ ID NO: 78511 - DNA, 110 bp, synthetic construct
  source 1..110: mol_type = other DNA
tttgttttaacgtaaatatttttgtaagacttcctcgacgtcttaagggtatgcagagtttcgctttctggggtaggtattttcccaccattacaaatgaaaatatttga

SEQ ID NO: 78512 - DNA, 110 bp, synthetic construct
  source 1..110: mol_type = other DNA
tctttaaaataagaaaatccttaaaaagtgctaacacagtggttcagcaactggcttgttaaagtgcttaataaacaccagctattacggactgctgctggaagactatg

SEQ ID NO: 78513 - DNA, 110 bp, synthetic construct
  source 1..110: mol_type = other DNA
aggttagaccatggcatacagtaacacaatactcagtgtcctcccgaactccaatgaagagttatttctcaaaatgacaatagtcgcttgcattaataccctcaaaaccc

SEQ ID NO: 78514 - DNA, 110 bp, synthetic construct
  source 1..110: mol_type = other DNA
gtacagtgctattaccctaacaaagaagtgtgtctgtcttgaaataacaatgaggtattctccttctatttattcaaatatgaatgagttccaaatgctaaaaatattat

SEQ ID NO: 78515 - DNA, 110 bp, synthetic construct
  source 1..110: mol_type = other DNA
tatgcattttcctctaaagagttactaaacaccttgcaaatgaaaaattgcagctgagaaagattaagtaatttgaccctgaagttttccattttattcagttctggtta

SEQ ID NO: 78516 - DNA, 110 bp, synthetic construct
  source 1..110: mol_type = other DNA
tgggctgcatatcctagcagcctttatacctccttgccgaaatatatgatcagcactttgttagtcatttctttgacccttagccttttaaattttacagaaaaatcatc

SEQ ID NO: 78517 - DNA, 110 bp, synthetic construct
  source 1..110: mol_type = other DNA
ctgcccactgcagtaaaagccacctaaagtggtccatattctcatgagacattcccacttaattacatgatcatttttgtctcttccatttatttcccaaagatgattaa

SEQ ID NO: 78518 - DNA, 110 bp, synthetic construct
  source 1..110: mol_type = other DNA
actctgtccccaccaacccacccctgcacagataattaaaaactaacaatcactagcaaagcttgaaatcttccatctcttccattttcaataatagtgcatgttctttt

SEQ ID NO: 78519 - DNA, 110 bp, synthetic construct
  source 1..110: mol_type = other DNA
tggcctgaaagggaaaattaaaaggcaaagattcttgaaatctcctttctgctgcctatgagactcttctgatttctgcttctatgaaaatgaatatttagcattcttca

SEQ ID NO: 78520 - DNA, 110 bp, synthetic construct
  source 1..110: mol_type = other DNA
tatcctcacagccatgctaccaatagccagcagacagcatgttcgctttaggtattctctgcaagcagaggtcatgactatccgctatattccccaaagtgctttgtttt

SEQ ID NO: 78521 - DNA, 110 bp, synthetic construct
  source 1..110: mol_type = other DNA
tctctgcaagcagaggtcatgactatccgctatattccccaaagtgctttgttttttaaaaataaccgtataaatctgcatattgtttatttaactgaatgatctacagg

SEQ ID NO: 78522 - DNA, 110 bp, synthetic construct
  source 1..110: mol_type = other DNA
tgatgttatgctagaggcaactttctaatctaagaaatcctcagaaatcatcttagtggtagaacagaaaaagaaaaatatgctcaatgctcttatttttaacaatgtac

SEQ ID NO: 78523 - DNA, 110 bp, synthetic construct; identical to SEQ ID NO: 78522
  source 1..110: mol_type = other DNA

SEQ ID NO: 78524 - DNA, 110 bp, synthetic construct
  source 1..110: mol_type = other DNA
tcgaaaaaggaaaaaaaaaaaaaaaacaaggattgtttgctgtgcgataatgcaaagagacccaatgattgaggtggaaggggctcatagtaaagagggaaatatggtcc

SEQ ID NO: 78525 - DNA, 110 bp, synthetic construct
  source 1..110: mol_type = other DNA
agagacccaatgattgaggtggaaggggctcatagtaaagagggaaatatggtccacgtattaattaatgatggcatgatccaagacagaagaggacttttcttacagac

SEQ ID NO: 78526 - DNA, 110 bp, synthetic construct
  source 1..110: mol_type = other DNA
aagattataatcgttcaattcatgacacattggttttgatctgaagattattatgtacatagatgcttagtacatcaacattctgcctgaccgaaagaacaatccagtga

SEQ ID NO: 78527 - DNA, 110 bp, synthetic construct
  source 1..110: mol_type = other DNA
agtaacgatttgattatccagctccacttctgtaagatcacatttcttacagctgaaaaacaaatatacactttagacaatccgcatcaaatgttgtgtcagaatctaag

SEQ ID NO: 78528 - DNA, 110 bp, synthetic construct
  source 1..110: mol_type = other DNA
aaaaacaaatatacactttagacaatccgcatcaaatgttgtgtcagaatctaagtgactacttctatccaaaatcaactggtgctaacaaagggtgactcctttcagac

SEQ ID NO: 78529 - DNA, 110 bp, synthetic construct
  source 1..110: mol_type = other DNA
ttcagaatgacagtggtgcagaagcacaaataaatccaggctttcctattctttacaggattttatttatcatttgtggactccacattattcatgtcattctcatacca

SEQ ID NO: 78530 - DNA, 110 bp, synthetic construct
  source 1..110: mol_type = other DNA
ttaatatcccttaatatccacagttgaggaaattgtggttatgagagacaaatgtcagacatctccttgattctctgtgtccgatgatagaacagccttggttcttagag

SEQ ID NO: 78531 - DNA, 110 bp, synthetic construct
  source 1..110: mol_type = other DNA
cagacatctccttgattctctgtgtccgatgatagaacagccttggttcttagagagctcacctaaaggaagaatttttcaagctatgggctttcagactctggttttcc

SEQ ID NO: 78532 - DNA, 110 bp, synthetic construct
  source 1..110: mol_type = other DNA
aaaacaacaaataagaaaaatgaactggacttaaatttagaagtaatcgagaacagttagagtgttagcctgtttggggctttacaaggttattttgccctcagtggaga

SEQ ID NO: 78533 - DNA, 110 bp, synthetic construct
  source 1..110: mol_type = other DNA
ggtcgataaatattcatcacatggatgaatgatcccagtatattcatagcattagccacacaggcagtaggtgttctctatgtgtcgggcacaatattaatgcttcctat

SEQ ID NO: 78534 - DNA, 110 bp, synthetic construct
  source 1..110: mol_type = other DNA
tatccagatgtctgtatgctgccaacaaagctctccttgtctcaaggtcaggatcctgcttgaagtttctccttccataaatctcagaaatgagtccctgacatgttatt

SEQ ID NO: 78535 - DNA, 110 bp, synthetic construct
  source 1..110: mol_type = other DNA
tggtcctttgtagattatgttaactatctaaaggatggtaaaatttgctacctcctctcctctaaaccttaaaaattattaacaatcctccttggcgacatcaagaggta

SEQ ID NO: 78536 - DNA, 110 bp, synthetic construct
  source 1..110: mol_type = other DNA
atctaaaggatggtaaaatttgctacctcctctcctctaaaccttaaaaattattaacaatcctccttggcgacatcaagaggtaggaggggcaattacatgatataagc

SEQ ID NO: 78537 - DNA, 110 bp, synthetic construct
  source 1..110: mol_type = other DNA
ggaagagtctggcaaatgatcatccttcgtgaatggtagctgaaaatacacagtctcttttctgagtttcttctctactcgctattctccttgccttggagacatagaaa

SEQ ID NO: 78538 - DNA, 110 bp, synthetic construct
  source 1..110: mol_type = other DNA
gtagttgtgacagagaccacatggcctataaggcctatgctatttactgtctggctctgtattaaaagggttttctgacccctgctttggaagaaagaaaaaaaagcagg

SEQ ID NO: 78539 - DNA, 110 bp, synthetic construct
  source 1..110: mol_type = other DNA
ggattgaagtcagatttcttgataataaaacttaacctgtcttttgttgactctgccttccgcttaagggatgagctcctcttgatagaccagtgcccattcattcttac

SEQ ID NO: 78540 - DNA, 110 bp, synthetic construct
  source 1..110: mol_type = other DNA
ccttccgcttaagggatgagctcctcttgatagaccagtgcccattcattcttacttctaaagaggatgctgatctcttgggaggcctccgcatagaacttgaggagtag

SEQ ID NO: 78541 - DNA, 110 bp, synthetic construct
  source 1..110: mol_type = other DNA
atgagtaaatatcaatgattgataggtagctcagagtcagagagctttaagaagcagacagaacatagttttaatcccagttctgtcattcacacagtgtaatttaggcc

SEQ ID NO: 78542 - DNA, 110 bp, synthetic construct
  source 1..110: mol_type = other DNA
gctgctcctttgggggtggctgcactcaaagatcccagggtctcaacaggagccagcacaaggcgaaggttctttactctgtatgcctctcactctctccctgtatggtc

SEQ ID NO: 78543 - DNA, 110 bp, synthetic construct
  source 1..110: mol_type = other DNA
gcacaaggcgaaggttctttactctgtatgcctctcactctctccctgtatggtctgatggaagcaagagaagtgagagtcccttgcttcttggaaatttagattagaaa

SEQ ID NO: 78544 - DNA, 110 bp, synthetic construct
  source 1..110: mol_type = other DNA
tttgttttcatcacattattgacatagacgtttcagcagccagtgctgagtttccaggtcacctgctccattgtcctttagcgtggaattcctttttagctctgtcacca

SEQ ID NO: 78545 - DNA, 110 bp, synthetic construct
  source 1..110: mol_type = other DNA
aggtcacctgctccattgtcctttagcgtggaattcctttttagctctgtcaccagtgtagaactcaccaccaggtctgttttctgacaccctaacaccatcccaatctt

SEQ ID NO: 78546 - DNA, 110 bp, synthetic construct; identical to SEQ ID NO: 78544
  source 1..110: mol_type = other DNA

SEQ ID NO: 78547 - DNA, 110 bp, synthetic construct; identical to SEQ ID NO: 78545
  source 1..110: mol_type = other DNA

SEQ ID NO: 78548 - DNA, 110 bp, synthetic construct
  source 1..110: mol_type = other DNA
gcattaccaagaaagtacggtgcaagaatataacagaggatggcaatttagatcagtaagtttaggagctgtccctctgagcgagtgacattgaagcctagccctggagg

SEQ ID NO: 78549 - DNA, 110 bp, synthetic construct
  source 1..110: mol_type = other DNA
gtaagtttaggagctgtccctctgagcgagtgacattgaagcctagccctggaggaggagggagttcattggctctggggagaacaggagaagcacatcctggcgagaga

SEQ ID NO: 78550 - DNA, 110 bp, synthetic construct; identical to SEQ ID NO: 78548
  source 1..110: mol_type = other DNA

SEQ ID NO: 78551 - DNA, 110 bp, synthetic construct; identical to SEQ ID NO: 78549
  source 1..110: mol_type = other DNA

SEQ ID NO: 78552 - DNA, 110 bp, synthetic construct
  source 1..110: mol_type = other DNA
atcacgactaagtgtttatgggcacaatccacagccaacccgcaccacagagccggccggctgaaagccaagcaggagggggtaccgcaggctggctttctgaaggatga

SEQ ID NO: 78553 - DNA, 110 bp, synthetic construct
  source 1..110: mol_type = other DNA
aagaaataggatgagcacagagaaactggtccttcctggatccccttacagctacatggttgctgacagctttctaggggcacccctgggacaaagcagttgacacactt

SEQ ID NO: 78554 - DNA, 110 bp, synthetic construct
  source 1..110: mol_type = other DNA
attaaaagataaactggatatgatactagatggtgttatttaaaatgagaaattaggtagtttgcagacctctgggaatccctgagaacctttcagaagattcataaggt

SEQ ID NO: 78555 - DNA, 110 bp, synthetic construct
  source 1..110: mol_type = other DNA
aaaaaattagcagagaagaaacagtcgtgggtttttactccacttctctctctcttaacatctcaagctcccaagagctctcaggttttgaggaaagagctgcatctctt

SEQ ID NO: 78556 - DNA, 110 bp, synthetic construct
  source 1..110: mol_type = other DNA
taacatctcaagctcccaagagctctcaggttttgaggaaagagctgcatctcttctttctccccaatgctccctgctttgctgggttgtgcacaggtaagatgggtctg

SEQ ID NO: 78557 - DNA, 110 bp, synthetic construct; identical to SEQ ID NO: 78555
  source 1..110: mol_type = other DNA

SEQ ID NO: 78558 - DNA, 110 bp, synthetic construct; identical to SEQ ID NO: 78556
  source 1..110: mol_type = other DNA

SEQ ID NO: 78559 - DNA, 110 bp, synthetic construct
  source 1..110: mol_type = other DNA
tttcccctaaataaatttataatctctgggtgaggttgaaccaaaggatgttaagttccaggatatctggtacagcaggagtaagactgcaaactgaaaacacaagcatt

SEQ ID NO: 78560 - DNA, 110 bp, synthetic construct
  source 1..110: mol_type = other DNA
cccggtcccataaaaggtcgctctgcaggcagttgggctctttcccccttcctctggcccttggctgacctgcctgtctcgccccggcagagctctctcaacgagaagag

SEQ ID NO: 78561 - DNA, 110 bp, synthetic construct
  source 1..110: mol_type = other DNA
ggcccttggctgacctgcctgtctcgccccggcagagctctctcaacgagaagaggaaggtcctggctggccagcacgaggacgcccgggagctcaaggagaacctggat

SEQ ID NO: 78562 - DNA, 110 bp, synthetic construct
  source 1..110: mol_type = other DNA
ttaccaaaatgattcagtaactatttgagtcccaattgcatggtgggctaggcactgtatgagattctaaggtgagtcatatatggtcctgtttctaagagacttttcca

SEQ ID NO: 78563 - DNA, 110 bp, synthetic construct
  source 1..110: mol_type = other DNA
gtctgcctatagcccgtgggctgtgtgaggggagagggcggggcaggaggaaccatggcttctgctcgcattagctttttggacaccaaaatctactctcccaagcacaa

SEQ ID NO: 78564 - DNA, 110 bp, synthetic construct
  source 1..110: mol_type = other DNA
tgagggaaaaaaagacatttcttttcactcaagataacccttccctcaagctagcacagctcaaccggattaggagaaaccatccagttaatgacttctccctcaggaag

SEQ ID NO: 78565 - DNA, 110 bp, synthetic construct
  source 1..110: mol_type = other DNA
acagctcaaccggattaggagaaaccatccagttaatgacttctccctcaggaaggaaagagtagtacagttatccaacattccagcttttaccaaggaaggactagttt

SEQ ID NO: 78566 - DNA, 110 bp, synthetic construct
  source 1..110: mol_type = other DNA
ggagcctttcttctcttctttcttttaatcaaagaatccttgaaaaccctaaaagtgtgggctaaaatttttgtgttcctgtgtgcatttttctggagcaacgttggata

SEQ ID NO: 78567 - DNA, 110 bp, synthetic construct
  source 1..110: mol_type = other DNA
tgtgggctaaaatttttgtgttcctgtgtgcatttttctggagcaacgttggataacctgaaaataagttggagaatcactgccttagacactctcatgaccacggtttg

SEQ ID NO: 78568 - DNA, 110 bp, synthetic construct
  source 1..110: mol_type = other DNA
gatcttttgggcaaactataaggacatacttagagaggaaaaaacttgtagtgtttagtccatcagctgaattatctgggacttctttctctgtaacaccaccaaaacct

SEQ ID NO: 78569 - DNA, 110 bp, synthetic construct
  source 1..110: mol_type = other DNA
cctcttgggaaccactggagtggagccagagtcggaaagaacaacgtggccactgtcaccatatccaacgatgaagatggtaacaggagagattgcctttagttgttctg

SEQ ID NO: 78570 - DNA, 110 bp, synthetic construct
  source 1..110: mol_type = other DNA
gcatattttcaacactttgattttcttaaaagcttaaatatctgaagagccatgttcttgacccttccttaaataaaataatacttgaaaactcaggagttcttgtcgtg

SEQ ID NO: 78571 - DNA, 110 bp, synthetic construct
  source 1..110: mol_type = other DNA
tacagtgctatatgtgttctatgaaaagtaactcctaattacagggtagaaatactgtttttccttagagaaatgatttgctttggtcctaagtaaatctgacgtgtttc

SEQ ID NO: 78572 - DNA, 110 bp, synthetic construct; identical to SEQ ID NO: 78571
  source 1..110: mol_type = other DNA

SEQ ID NO: 78573 - DNA, 110 bp, synthetic construct
  source 1..110: mol_type = other DNA
gtgtgttgagaatctgtcattgcttcagcagccgtggtgtaggttttggctagggctcagattctatccctggcctgagaacttccatatactgcaggtgcagccaaaaa

SEQ ID NO: 78574 - DNA, 110 bp, synthetic construct
  source 1..110: mol_type = other DNA
ctcagattctatccctggcctgagaacttccatatactgcaggtgcagccaaaaaaggaaaaaaaaatcacgaagctgatatcaggatgtggttttgtttgtttgttctc

SEQ ID NO: 78575 - DNA, 110 bp, synthetic construct
  source 1..110: mol_type = other DNA
tcatagtttacattcgagttcccccttgatggggtacattccatgcatttgcataagtgtataatgtcatgtaaatagactagcatacacatacagtatcatatagaata

SEQ ID NO: 78576 - DNA, 110 bp, synthetic construct
  source 1..110: mol_type = other DNA
tttctaggtccactgagagccttgtattcccgctcttccaaccatttcaaatcgatacggacagttcagatgcctacccccagcttctgtccaattatatttatgtcaat

SEQ ID NO: 78577 - DNA, 110 bp, synthetic construct
  source 1..110: mol_type = other DNA
tgcagcacctgccagcagcccctcccccacccatctgactctgtgtgatgccccggcagagggcgacaggccaggctctggctgatccgagccctactctaaagccccag

SEQ ID NO: 78578 - DNA, 110 bp, synthetic construct
  source 1..110: mol_type = other DNA
aacagggttaatgccttagaagaggctccagaaagatgcttggcccccacaagtggggtcagcgaggagttggtgacccaggaaagggctctttgcctgaacagcctcca

SEQ ID NO: 78579 - DNA, 110 bp, synthetic construct
  source 1..110: mol_type = other DNA
tgggagagaggagctcttgagccaggtgttagaacccaaccctgagttgccagccataagctgccagggagagtcccataggcgatcccagctcgctaccgggccgtgcc

SEQ ID NO: 78580 - DNA, 110 bp, synthetic construct
  source 1..110: mol_type = other DNA
ataagctgccagggagagtcccataggcgatcccagctcgctaccgggccgtgccatcatgcaggctgctcggtcatcggcaggcttggtccctaacaggagcctcaggt

SEQ ID NO: 78581 - DNA, 110 bp, synthetic construct
  source 1..110: mol_type = other DNA
tatgtaagcggtagacttgataataggatagagcagcccgggaggccaaggttatccacttcacctttctgtgacattacaacgctttaaacttccttaaaattggtaaa

SEQ ID NO: 78582 - DNA, 110 bp, synthetic construct
  source 1..110: mol_type = other DNA
ccacttcacctttctgtgacattacaacgctttaaacttccttaaaattggtaaatgtaaaaactatgttttgaggtatgttgacaaatactaaacccccaaatttgcgg

SEQ ID NO: 78583 - DNA, 110 bp, synthetic construct; identical to SEQ ID NO: 78581
  source 1..110: mol_type = other DNA

SEQ ID NO: 78584 - DNA, 110 bp, synthetic construct; identical to SEQ ID NO: 78582
  source 1..110: mol_type = other DNA

SEQ ID NO: 78585 - DNA, 110 bp, synthetic construct
  source 1..110: mol_type = other DNA
attgggtgatctgatccaaagtcatcaaaaagaatagtggtttctttggggatgctactggaagtgttatggagacatgactagacatgacgtatgatattaggctgact

SEQ ID NO: 78586 - DNA, 110 bp, synthetic construct
  source 1..110: mol_type = other DNA
cccagagagcattgtgaaccgaagagagtcatcagtttcaccttggacccactgaatcagaacatcctaaggcagggcctgggagttcattttttttccaaaggctctta

SEQ ID NO: 78587 - DNA, 110 bp, synthetic construct
  source 1..110: mol_type = other DNA
gtggtccaggaagaggtgagctgtataagcattcagggccctcctcttgtgaattgagggccaaagatatttccccacggacaggaggactagcagaagcccttgccctg

SEQ ID NO: 78588 - DNA, 110 bp, synthetic construct
  source 1..110: mol_type = other DNA
gttcctgccctgttgtttgtttgacctgaggcatccaagcactgaagcctatagatagttgggtggggccagatcttggtgccaaaatagaggcctccaagagagcttat

SEQ ID NO: 78589 - DNA, 110 bp, synthetic construct
  source 1..110: mol_type = other DNA
cagaggtgactagagaggcagtagctgcatgaagttgccagctcagccagaacaatgcaggaaacctagaaaagagacctctgcaggcacagaacctgtttccttgctcc

SEQ ID NO: 78590 - DNA, 110 bp, synthetic construct
  source 1..110: mol_type = other DNA
ttaattataggccctggacaacacaggagttataagttggcttgctacaagttttgtgttgcttaacaactctttaaaacaattctcctacatctgtgctttaagtgcat

SEQ ID NO: 78591 - DNA, 110 bp, synthetic construct
  source 1..110: mol_type = other DNA
gtgttgcttaacaactctttaaaacaattctcctacatctgtgctttaagtgcatgtcggtgttactggatgatttcattgatcacagctgccctgttctacagcagaga

SEQ ID NO: 78592 - DNA, 110 bp, synthetic construct
  source 1..110: mol_type = other DNA
gatcagcctcccaccaaggactctcaggctaagacagttgtggccttttcatgtacctgcttaagacacagtgctatctgtagcctggtacctggcacatactaaatggc

SEQ ID NO: 78593 - DNA, 110 bp, synthetic construct
  source 1..110: mol_type = other DNA
actgactttgatcaaaaaagagggagttgacataccatctgtgagtctgactctgatttctgtcctgtatttatcatagcatctcagttcaaaatcaaagagcctcacgt

SEQ ID NO: 78594 - DNA, 110 bp, synthetic construct
  source 1..110: mol_type = other DNA
aacctatagaatctgaaaactgttttctgttcttctcagggaacaaataaatagacactgtgaagggaggtgattttgttccttgtctgatgcatgcatgcagaatacca

SEQ ID NO: 78595 - DNA, 110 bp, synthetic construct
  source 1..110: mol_type = other DNA
gaggcgagctccatgtccttttattctacatcttgatctgaccctgttctaggctaatcttagacctatcctggaatgagcctcttttctgaggaacttaggttcttttg

SEQ ID NO: 78596 - DNA, 110 bp, synthetic construct
  source 1..110: mol_type = other DNA
aatcttagacctatcctggaatgagcctcttttctgaggaacttaggttcttttgtggagaatggtcttagagaccaagacttgggtgttaggtgttctcattatccttg

SEQ ID NO: 78597 - DNA, 110 bp, synthetic construct
  source 1..110: mol_type = other DNA
aggatttacctgtaagcaagtgtaaccatgattgacagaaccactcttttttgaaaccattgttaggattttgagtgctccatgttaggaagatccatactgaaaatcag

SEQ ID NO: 78598 - DNA, 110 bp, synthetic construct; identical to SEQ ID NO: 78597
  source 1..110: mol_type = other DNA

SEQ ID NO: 78599 - DNA, 110 bp, synthetic construct
  source 1..110: mol_type = other DNA
tagaatcatatttcctttaatgtgcagagagtactgagttcatgctctcatctgttcagaggggtaggaggtccagtctttttcctgaggctctttccttaggaatttag

SEQ ID NO: 78600 - DNA, 110 bp, synthetic construct
  source 1..110: mol_type = other DNA
aagttattaactgctctagctctgttctctcataaagctaagggtttggggcacgtgatctgtagattcctttctgttgaaacaggagggaagggggcagggcacaacct

SEQ ID NO: 78601 - DNA, 110 bp, synthetic construct
  source 1..110: mol_type = other DNA
agccctacgtgatggggctccagccttggcactcagatgtagccctatctgctttggcccttccacactccactgacctggccttaggttaagcttcgtcctccatcagg

SEQ ID NO: 78602 - DNA, 110 bp, synthetic construct
  source 1..110: mol_type = other DNA
ggcccttccacactccactgacctggccttaggttaagcttcgtcctccatcagggccttggctcatgctggtccttctgtttgaaatgttcttctctgggttctttctt

SEQ ID NO: 78603 - DNA, 110 bp, synthetic construct; identical to SEQ ID NO: 78601
  source 1..110: mol_type = other DNA

SEQ ID NO: 78604 - DNA, 110 bp, synthetic construct; identical to SEQ ID NO: 78602
  source 1..110: mol_type = other DNA

SEQ ID NO: 78605 - DNA, 110 bp, synthetic construct
  source 1..110: mol_type = other DNA
aaaatttatatctcgcagctagctatgtatttggagaacaacttccccatggaagggaaagcttattttaataattcagggacccatcttatgctatagagatgtgctat

SEQ ID NO: 78606 - DNA, 110 bp, synthetic construct
  source 1..110: mol_type = other DNA
gatgcagtttttcaaatagtttttgtcacacattgagaaatctgtatgcttgctgctctgcagtgtgagggaaagaaatgctcaaacatctcaaagcaaagagaactcac

SEQ ID NO: 78607 - DNA, 110 bp, synthetic construct
  source 1..110: mol_type = other DNA
tgcctgaggggcttttaaacaccaaagatccccacccccaaccaattaaatcctaatttctgagctgtggggccagtgctatgaaaacttctgaggtgatgctgatgggt

SEQ ID NO: 78608 - DNA, 110 bp, synthetic construct
  source 1..110: mol_type = other DNA
ttcaatgaatagataggctttttttttttttttttcttgtgcaagtaaagcaaatggttctttcaagttgaagctgaaactctgcatagtcagttttctctgaccctttg

SEQ ID NO: 78609 - DNA, 110 bp, synthetic construct
  source 1..110: mol_type = other DNA
ggttctttcaagttgaagctgaaactctgcatagtcagttttctctgaccctttggtgtagactctttggactataattggagagtcattgaggagagggagccgtaaag

SEQ ID NO: 78610 - DNA, 110 bp, synthetic construct; identical to SEQ ID NO: 78608
  source 1..110: mol_type = other DNA

SEQ ID NO: 78611 - DNA, 110 bp, synthetic construct; identical to SEQ ID NO: 78609
  source 1..110: mol_type = other DNA

SEQ ID NO: 78612 - DNA, 110 bp, synthetic construct
  source 1..110: mol_type = other DNA
ggtaattccacgattcatttttgagacccagccgccttgtctgccatgacagctgcaccattttacattcccagcagccttgcgcaaagattccaactgctccacatcct

SEQ ID NO: 78613 - DNA, 110 bp, synthetic construct
  source 1..110: mol_type = other DNA
caccattttacattcccagcagccttgcgcaaagattccaactgctccacatccttgccaacacttgctactttctctatttttgaccagagccctcctaataggtggaa

SEQ ID NO: 78614 - DNA, 110 bp, synthetic construct
  source 1..110: mol_type = other DNA
cttggaccatctgtctaggtcgtcacagtgtagcccagccctgcttctgccctgtgccctctcacccttctcaccccaaaccatctccctgcccttcccacagctgaatc

SEQ ID NO: 78615 - DNA, 110 bp, synthetic construct
  source 1..110: mol_type = other DNA
gccctctcacccttctcaccccaaaccatctccctgcccttcccacagctgaatctaccacatcctctaagactcagcccaagcccaacctcttgcatgaaaaaaattcc

SEQ ID NO: 78616 - DNA, 110 bp, synthetic construct
  source 1..110: mol_type = other DNA
gaaagctctgtgtgcttctttagtagttttcacaggatactctgtgaaataaatatggtttatttcattttattttttaaagatcttttttcctttttttttggctgcgg

SEQ ID NO: 78617 - DNA, 110 bp, synthetic construct
  source 1..110: mol_type = other DNA
ggaagaatgcagcaatatagatgatgaagatgtcagattcacatcattaggaatttaattcttaataatgaaaagccaacacgattaaattgagttgggattagcttgta

SEQ ID NO: 78618 - DNA, 110 bp, synthetic construct
  source 1..110: mol_type = other DNA
taattcttaataatgaaaagccaacacgattaaattgagttgggattagcttgtacctacaggggaaaatatagttcctgagatctcccagcctttttagaatgcaaaga

SEQ ID NO: 78619 - DNA, 110 bp, synthetic construct; identical to SEQ ID NO: 78617
  source 1..110: mol_type = other DNA

SEQ ID NO: 78620 - DNA, 110 bp, synthetic construct; identical to SEQ ID NO: 78618
  source 1..110: mol_type = other DNA

SEQ ID NO: 78621 - DNA, 110 bp, synthetic construct
  source 1..110: mol_type = other DNA
tgagcatggcttggtcttagaacctccaagggcactgctgtccatctcaaggaaactgtgattagagacgtcttgaagatattgaactgcagctagatccaagtctcctc

SEQ ID NO: 78622 - DNA, 110 bp, synthetic construct
  source 1..110: mol_type = other DNA
ctgtgattagagacgtcttgaagatattgaactgcagctagatccaagtctcctcttatgaaaagctataggggcacattaaagccatcccaacagggttactctgaaac

SEQ ID NO: 78623 - DNA, 110 bp, synthetic construct
  source 1..110: mol_type = other DNA
ctttaaagtgtcaggaaaatctggcaggcaaatctgacagtagaactcaataataaacgtccactcatgccctagcgaagcatgtaagctgcacctagaagtaactagat

SEQ ID NO: 78624 - DNA, 110 bp, synthetic construct
  source 1..110: mol_type = other DNA
aacgtccactcatgccctagcgaagcatgtaagctgcacctagaagtaactagatcttagggtaggaggagcttaaagaggacgcttaagaagcttaactttatctaaga

SEQ ID NO: 78625 - DNA, 110 bp, synthetic construct
  source 1..110: mol_type = other DNA
gtatgacaagtgccagggcagaagtatgtcaggctatggcagcagtcatgggagtactcaggccacccagaagtgtgggtgtgtgtgtgttagaggaggtgatttaaagc

SEQ ID NO: 78626 - DNA, 110 bp, synthetic construct
  source 1..110: mol_type = other DNA
cagcagttgataatgcgccaatctcagcccactgcgcatgcgcaccacaaaggcctttctccccggcatccaggacttttcccgaaaagtctcaaagtgatcagtttcga

SEQ ID NO: 78627 - DNA, 110 bp, synthetic construct
  source 1..110: mol_type = other DNA
tctaaattctctgaatcgctttaagtctcaattatgcacaataatcctgaacaacgatgaacaagggcgaagcacatcttgcagaaataattcttgtatcaagggcattt

SEQ ID NO: 78628 - DNA, 110 bp, synthetic construct
  source 1..110: mol_type = other DNA
tactataattatgccatattaatctatcttacacttcaagctcctcaaatctgtaaaggctcccactgactagaggttcaaatctagattcttcagccttgcattagagg

SEQ ID NO: 78629 - DNA, 110 bp, synthetic construct; identical to SEQ ID NO: 78628
  source 1..110: mol_type = other DNA

SEQ ID NO: 78630 - DNA, 110 bp, synthetic construct
  source 1..110: mol_type = other DNA
tggaagcctggcctacgtcctcggaagccaaagttgcttcagagaaattgtccccggcagaatagtggttctgcaccaggccatttctccagagctctgccaagtgcaaa

SEQ ID NO: 78631 - DNA, 110 bp, synthetic construct
  source 1..110: mol_type = other DNA
ggcagaatagtggttctgcaccaggccatttctccagagctctgccaagtgcaaagtctccctcatctctgcctgctcctcctggcttgtctttgctgcctcaccgcagt

SEQ ID NO: 78632 - DNA, 110 bp, synthetic construct
  source 1..110: mol_type = other DNA
gcagtactcaaatctttgcaaactacatttctgcttgcagtggcccctaaataaggatcctagccagtgactctgcccatctgcagggctgagatggtggccatgtctga

SEQ ID NO: 78633 - DNA, 110 bp, synthetic construct
  source 1..110: mol_type = other DNA
gctaaatgatcaaggtccagagtcatgtaccagcatggcccctggacccatccttatagctgtcagacatcctcagagagagaagatcattgaggggcaggtactgttac

SEQ ID NO: 78634 - DNA, 110 bp, synthetic construct
  source 1..110: mol_type = other DNA
cggattcgttaaccactgcgccacgacaggaactccgattgcgaatattttaaagaaaacattcccttcattctttcaatgtggctacagttaattttttctgatttcca

SEQ ID NO: 78635 - DNA, 110 bp, synthetic construct; identical to SEQ ID NO: 78634
  source 1..110: mol_type = other DNA

SEQ ID NO: 78636 - DNA, 110 bp, synthetic construct
  source 1..110: mol_type = other DNA
tgtctttggtaatattgcttcccatgcctataataatactccctccctctcttacatcttgtccaacacccatttgcctcccacatcaagaatgatcttctctgcaaagc

SEQ ID NO: 78637 - DNA, 110 bp, synthetic construct
  source 1..110: mol_type = other DNA
atcttgtccaacacccatttgcctcccacatcaagaatgatcttctctgcaaagcctttgctttggcctctcactaccgtactgcgtcctcctgtccataccagtttatt

SEQ ID NO: 78638 - DNA, 110 bp, synthetic construct
  source 1..110: mol_type = other DNA
agcttgtgtcagaagatctctcatcacgtatatgaagcctccctaaattaataattcaacaccatctcaataacaaatggcaccatgattcttttggaaagtgaacacag

SEQ ID NO: 78639 - DNA, 110 bp, synthetic construct; identical to SEQ ID NO: 78638
  source 1..110: mol_type = other DNA

SEQ ID NO: 78640 - DNA, 110 bp, synthetic construct
  source 1..110: mol_type = other DNA
aatggagatgctggcagtcattgatcaagtcccgatcattttgggcagattgccgtagaagttgtggtgtagcttctcaggctggttgctactgaggttgtgggtcggag

SEQ ID NO: 78641 - DNA, 110 bp, synthetic construct
  source 1..110: mol_type = other DNA
gtacaatcatctgaagaattttcacactatggtcaacattaataataaaaactgtactatttccaatttttaaactaaaagcccaattactttgctcctcctggcaaggt

SEQ ID NO: 78642 - DNA, 110 bp, synthetic construct
  source 1..110: mol_type = other DNA
aaattttgttttgatttgaaaagggaaaggtctggtccctaccaaagctgtggcaacttcttttatattttgatgggattctgcatttcttgatctatactgcagtatta

SEQ ID NO: 78643 - DNA, 110 bp, synthetic construct
  source 1..110: mol_type = other DNA
ggggaaatccaaattaagacaagcactactattatcctcattgtattggaaacagaggtgcaggaaggctaaatatcttgcctgaggtcttacagctgggaagggaggga

SEQ ID NO: 78644 - DNA, 110 bp, synthetic construct
  source 1..110: mol_type = other DNA
aggtgcaggaaggctaaatatcttgcctgaggtcttacagctgggaagggagggaggccgggtttgagctcagtctctgctgagcctattttcttgagcacttctccatc

SEQ ID NO: 78645 - DNA, 110 bp, synthetic construct; identical to SEQ ID NO: 78643
  source 1..110: mol_type = other DNA

SEQ ID NO: 78646 - DNA, 110 bp, synthetic construct; identical to SEQ ID NO: 78644
  source 1..110: mol_type = other DNA

SEQ ID NO: 78647 - DNA, 110 bp, synthetic construct
  source 1..110: mol_type = other DNA
catttttcctgggcttatagtaagggctttggtacacagtcactaggattcttgtaggctattgactttctctattttaatttaaaatgatttctcaactaatacccaca

SEQ ID NO: 78648 - DNA, 110 bp, synthetic construct
  source 1..110: mol_type = other DNA
tacaatgtgagtaatgcttctgggtagcttgctaaaatacaaactctgattcagtagttctgagctgaaactctgatgtcaaaattttaaaataaatcagagattttttt

SEQ ID NO: 78649 - DNA, 110 bp, synthetic construct
  source 1..110: mol_type = other DNA
agttctgagctgaaactctgatgtcaaaattttaaaataaatcagagatttttttcctttggccacacctgcagcatgtggaatttacccgggccaaggttcagaccctc

SEQ ID NO: 78650 - DNA, 110 bp, synthetic construct
  source 1..110: mol_type = other DNA
cagagcacaataatacctaatttctatgattcttaaccacctggacctcctattttgcaggaccagcatgtctgtaaagcttgtgccggaactctctaatgcggtacttt

SEQ ID NO: 78651 - DNA, 110 bp, synthetic construct
  source 1..110: mol_type = other DNA
tgcaggaccagcatgtctgtaaagcttgtgccggaactctctaatgcggtactttccactgcagtgtatggtaccgacacagtctggctatgtagcaataaggctgggtt

SEQ ID NO: 78652 - DNA, 110 bp, synthetic construct
  source 1..110: mol_type = other DNA
tggcggaggacaacctttcagatttcaccatttaccccctgccccatcgaatgatcaaggacaggcctcttataccagcattggatctcatccttaaataggataaattc

SEQ ID NO: 78653 - DNA, 110 bp, synthetic construct
  source 1..110: mol_type = other DNA
gttcctgagcaaagaagagctcgaagaagagaaagtagcatcaggaaaatgacgtctttgaaatcgggatttcagagacagtaccgtttctaggtatgacaagggccagg

SEQ ID NO: 78654 - DNA, 110 bp, synthetic construct
  source 1..110: mol_type = other DNA
tgctcagccaagctggtgatccggtgggtggacatcacgcagctggagaagaatgccacgctgctcctgcctgatgtgatccaagtgagcacgaggtccagtgaacattt

SEQ ID NO: 78655 - DNA, 110 bp, synthetic construct
  source 1..110: mol_type = other DNA
attggtaatggggaagggcactggaattccttatgggggagcatgggggtgttgaaataacccagttgtcagagctatggttatatcctggataattttctaatccttca

SEQ ID NO: 78656 - DNA, 110 bp, synthetic construct
  source 1..110: mol_type = other DNA
aataacccagttgtcagagctatggttatatcctggataattttctaatccttcaactatttcctcatttctaacccttgctgtgtgttcagtccttcttttgaggttcc

SEQ ID NO: 78657 - DNA, 110 bp, synthetic construct
  source 1..110: mol_type = other DNA
aaaagaatgttcaggaaagaggcccaggatgccttgtttttcccaaggaccgtgaatgacctgtgagacgcatggttagtggtcagctgctctggcagaagtgacgactc

SEQ ID NO: 78658 - DNA, 110 bp, synthetic construct
  source 1..110: mol_type = other DNA
atgacctgtgagacgcatggttagtggtcagctgctctggcagaagtgacgactcctctgtcatttcagccttcctctctccactggaaggaaaggaaagtctctacgag

SEQ ID NO: 78659 - DNA, 110 bp, synthetic construct
  source 1..110: mol_type = other DNA
taagctttgtgtccttcacgtgatgctgagccgaatcagattttccttttagtcgttcgatcaaattttccttcctagagcttcgaaggcacacttgggaccatctagta

SEQ ID NO: 78660 - DNA, 110 bp, synthetic construct
  source 1..110: mol_type = other DNA
acgcatgcttacatgcacacacgcatacacacacacctcttctaccagcccagctgcatctctttggaggatggccttcggctagggtctggcttaaccagcaccaccca

SEQ ID NO: 78661 - DNA, 110 bp, synthetic construct
  source 1..110: mol_type = other DNA
gcatctctttggaggatggccttcggctagggtctggcttaaccagcaccacccacagagagtttaaggtgcttagaagttcatgtctctccagatgtgagatcccagtt

SEQ ID NO: 78662 - DNA, 110 bp, synthetic construct
  source 1..110: mol_type = other DNA
caggttcagctttatttactgccctgagaactgagggtgctgactcagcatatggtcctgtaaactggcaggagctctcaccctgttagaaaatattccctgcctttata

SEQ ID NO: 78663 - DNA, 110 bp, synthetic construct
  source 1..110: mol_type = other DNA
gctccagaacgtactggagaaagaggaatttgccccatgaaaatggagagctcatttctgaaaaactgttttccataaatcttgcaaattactggcctcaaatattctgg

SEQ ID NO: 78664 - DNA, 110 bp, synthetic construct
  source 1..110: mol_type = other DNA
tttgcgtatgccactcttaggacagagtgagcacatttctcatcatggactcttttgctagctgatccgaaagaggctcattccccaggaatgaccttcaactcccacat

SEQ ID NO: 78665 - DNA, 110 bp, synthetic construct
  source 1..110: mol_type = other DNA
gtcattctttccaaaaagatcaccaccttcttttgggagcagcatctagcttgctactggacctttaaggaactgaaaacttgaccatggcctgctgcgataccatgtga

SEQ ID NO: 78666 - DNA, 110 bp, synthetic construct
  source 1..110: mol_type = other DNA
actggacctttaaggaactgaaaacttgaccatggcctgctgcgataccatgtgatctgagtggtccttaccgaactgggtttggtctgacatactatgccatgaagttc

SEQ ID NO: 78667 - DNA, 110 bp, synthetic construct
  source 1..110: mol_type = other DNA
gccagaaaaacttgaactgttccatagagtttgatgtgatcactctacccactgagcatctgcagcttttccatattgaagtcgaagtgctggatattaatgacaattct

SEQ ID NO: 78668 - DNA, 110 bp, synthetic construct
  source 1..110: mol_type = other DNA
gcatctgcagcttttccatattgaagtcgaagtgctggatattaatgacaattctccccagttttcaagatctctcataccgattgagatatcagagagtgcggcagttg

SEQ ID NO: 78669 - DNA, 110 bp, synthetic construct
  source 1..110: mol_type = other DNA
cacattgtttctttctttactcaaaagtacttagaatgtttggaacgcatatggtaggggttaaattatctgtgataatttattttaggaaatgcacacctattttcttt

SEQ ID NO: 78670 - DNA, 110 bp, synthetic construct
  source 1..110: mol_type = other DNA
cagctctggcaaactaatataattaaatgcagagctaaaaaaaagaaaatagagatagactaattttgttgttgattgtcctttaacatgatcacttgttcccaacaaga

SEQ ID NO: 78671 - DNA, 110 bp, synthetic construct; identical to SEQ ID NO: 78670
  source 1..110: mol_type = other DNA

SEQ ID NO: 78672 - DNA, 110 bp, synthetic construct; identical to SEQ ID NO: 78670
  source 1..110: mol_type = other DNA

SEQ ID NO: 78673 - DNA, 110 bp, synthetic construct; identical to SEQ ID NO: 78670
  source 1..110: mol_type = other DNA

SEQ ID NO: 78674 - DNA, 110 bp, synthetic construct
  source 1..110: mol_type = other DNA
atgaaggatgctccctccgtctctaccctatacaaacatgcactgcattgtaattagctccagtttattaacaactatttaggggcagagatgatcttcccctttattgc

SEQ ID NO: 78675 - DNA, 110 bp, synthetic construct
  source 1..110: mol_type = other DNA
gatcagtaaaacctggtagaaaccggtccaggtgactcacttatatgcatggtctggctcagtggaggcttcatgcctcaattctctttcaggttaagtctatcactata

SEQ ID NO: 78676 - DNA, 110 bp, synthetic construct
  source 1..110: mol_type = other DNA
ggctcagtggaggcttcatgcctcaattctctttcaggttaagtctatcactatagcttccccagaacttagtggttgctttcctacagcaaggatctgaaagttgacag

SEQ ID NO: 78677 - DNA, 110 bp, synthetic construct
  source 1..110: mol_type = other DNA
cttcatgtgcttccttctgcttgtcatttaatttttacctcatatgtcagcttcacaggaaatccctgccagtctctccaacctctcatgttcttcattgtgctttttgc

SEQ ID NO: 78678 - DNA, 110 bp, synthetic construct
  source 1..110: mol_type = other DNA
caggaaatccctgccagtctctccaacctctcatgttcttcattgtgctttttgctatctgaaataatcttcaatacttatacattttatatctcacctcgaaaaatagt

SEQ ID NO: 78679 - DNA, 110 bp, synthetic construct
  source 1..110: mol_type = other DNA
atagcagatgaactgagggtataggtatagggtatttatatatgattcgtatatgatgatgtcaatttactcagatggagacgattaaagaattccttgtttggtgaaaa

SEQ ID NO: 78680 - DNA, 110 bp, synthetic construct
  source 1..110: mol_type = other DNA
agggtataggtatagggtatttatatatgattcgtatatgatgatgtcaatttactcagatggagacgattaaagaattccttgtttggtgaaaatcaggcattatcttt

SEQ ID NO: 78681 - DNA, 110 bp, synthetic construct
  source 1..110: mol_type = other DNA
tacagtaaggtgattctggacagctttgctggactcactcatgaagagttgttatatctcctggaaagtctgaaagatcacaatatgttgaaacaaggtcaaatgcacac

SEQ ID NO: 78682 - DNA, 110 bp, synthetic construct
  source 1..110: mol_type = other DNA
atctcctggaaagtctgaaagatcacaatatgttgaaacaaggtcaaatgcacacactaaactcattttagtagcaatgctaaagactaaataaataaagtggtgcaaga

SEQ ID NO: 78683 - DNA, 110 bp, synthetic construct
  source 1..110: mol_type = other DNA
ttttataagttttaatctatagtagcttgcttaaagttacaacacagaaaaaagatgtacataaaaataattgtaagatagtcgattttggggagtttctgctgtggcac

SEQ ID NO: 78684 - DNA, 110 bp, synthetic construct
  source 1..110: mol_type = other DNA
tacttgttagcccagcaccagaataggttcagactgtcttcccagacaatctgaacatattctcccttgaaaacagccaagcggatcagaggagcagtggagcaaaatgg

SEQ ID NO: 78685 - DNA, 110 bp, synthetic construct
  source 1..110: mol_type = other DNA
catattctcccttgaaaacagccaagcggatcagaggagcagtggagcaaaatgggccagcaccatgatatcaggcccagctctgaccaaatatgggattttagagagca

SEQ ID NO: 78686 - DNA, 110 bp, synthetic construct
  source 1..110: mol_type = other DNA
acaaaaaattctactagacaactctgccttagaatgttatacaagtccttccatggctgtgttctagcttgcttttccagcttcattctcccatggtgtcagcacacctc

SEQ ID NO: 78687 - DNA, 110 bp, synthetic construct
  source 1..110: mol_type = other DNA
tccatttagcaataggactctgtgcaagctagaagcctcccttcccagcctgtcttattgccagatgtggccatgtgactaaattcaagccaatggcagaggaacagatt

SEQ ID NO: 78688 - DNA, 110 bp, synthetic construct
  source 1..110: mol_type = other DNA
agttgtattcattcccactgtgccacaagagcaaatctttttttagtgataaaacaagctaagagcagaaaatctgttgtctattttaaaagcattttgacatttctacc

SEQ ID NO: 78689 - DNA, 110 bp, synthetic construct
  source 1..110: mol_type = other DNA
aagctaagagcagaaaatctgttgtctattttaaaagcattttgacatttctacccttacgtattatttgtcagttatatttgcagcttagagcaaaacttctcagctgt

SEQ ID NO: 78690 - DNA, 110 bp, synthetic construct
  source 1..110: mol_type = other DNA
tgagtctgatatccagacctggagtttcagttcctgtggttggaaagtgcagagcagtgagactgaccgtttgttgaggaccttttccatttcaattgctttataccgac

SEQ ID NO: 78691 - DNA, 110 bp, synthetic construct
  source 1..110: mol_type = other DNA
agtgagactgaccgtttgttgaggaccttttccatttcaattgctttataccgactgctgtgtactcctccaatattccaaatatcccatctctcttgctggtctctttg

SEQ ID NO: 78692 - DNA, 110 bp, synthetic construct
  source 1..110: mol_type = other DNA
atttctgaccattattagatatcatcctttgtatactctacagttttgctttcttgcaaacacagaatagtattcatttttctgtgctgaaatttcttcttcctctaaag

SEQ ID NO: 78693 - DNA, 110 bp, synthetic construct
  source 1..110: mol_type = other DNA
gcaaacacagaatagtattcatttttctgtgctgaaatttcttcttcctctaaagccacactgaagatataaattactcaacagtgtaaccagataagtctattagttct

SEQ ID NO: 78694 - DNA, 110 bp, synthetic construct
  source 1..110: mol_type = other DNA
cctatctcagactaaatactttttaatgtgcattagctctctttattaaaaaaagttaatgaaatgaccagtagacatttggtacattttaataacttcctccccccaaa

SEQ ID NO: 78695 - DNA, 110 bp, synthetic construct
  source 1..110: mol_type = other DNA
atctgttcttgtagtccaaaaaattctgtttgcatgatagatttgaacactggttggcaatcggccaagagaggatatctgttcttgatactgattctgatacaatttca

SEQ ID NO: 78696 - DNA, 110 bp, synthetic construct
  source 1..110: mol_type = other DNA
ggcaatcggccaagagaggatatctgttcttgatactgattctgatacaatttcagctggataggtcacaccaattttaactttgatggtcttttgcaccttgtgaagtc

SEQ ID NO: 78697 - DNA, 110 bp, synthetic construct; identical to SEQ ID NO: 78695
  source 1..110: mol_type = other DNA

SEQ ID NO: 78698 - DNA, 110 bp, synthetic construct; identical to SEQ ID NO: 78696
  source 1..110: mol_type = other DNA

SEQ ID NO: 78699 - DNA, 110 bp, synthetic construct
  source 1..110: mol_type = other DNA
tccaagctgtgtctgtgacctataccatagctcacagcaacaccagaacctgtaacccatggatactagtggggttcattaccattgagccacaacgggatctctggcat

SEQ ID NO: 78700 - DNA, 110 bp, synthetic construct
  source 1..110: mol_type = other DNA
tcagattactggggtcaggggagaggggctggctccataacacagttggttatggagtccatggtgttctgaagcttgcattgttctgctctgagattgtggttgttgct

SEQ ID NO: 78701 - DNA, 110 bp, synthetic construct
  source 1..110: mol_type = other DNA
agtccatggtgttctgaagcttgcattgttctgctctgagattgtggttgttgcttcttgtgtctgcaccctggttggtgagactgacctaaaggctagtgcaggctccc

SEQ ID NO: 78702 - DNA, 110 bp, synthetic construct; identical to SEQ ID NO: 78700
  source 1..110: mol_type = other DNA

SEQ ID NO: 78703 - DNA, 110 bp, synthetic construct; identical to SEQ ID NO: 78701
  source 1..110: mol_type = other DNA

SEQ ID NO: 78704 - DNA, 110 bp, synthetic construct
  source 1..110: mol_type = other DNA
ctctgtgatcctgaaaatttctggcaccacatatgaaaagaagatccagatgagtgggagaaacaggaatggactggcatcactgaaggtctgagccagcaggacagaac

SEQ ID NO: 78705 - DNA, 110 bp, synthetic construct
  source 1..110: mol_type = other DNA
gggagaaacaggaatggactggcatcactgaaggtctgagccagcaggacagaacaatgccctaaacatgtctggagcctggagcctgggaagagttaacatatgaaatt

SEQ ID NO: 78706 - DNA, 110 bp, synthetic construct; identical to SEQ ID NO: 78704
  source 1..110: mol_type = other DNA

SEQ ID NO: 78707 - DNA, 110 bp, synthetic construct; identical to SEQ ID NO: 78705
  source 1..110: mol_type = other DNA

SEQ ID NO: 78708 - DNA, 110 bp, synthetic construct
  source 1..110: mol_type = other DNA
ggccttcagtggcatcttactccctatttcaagacaaagcttaggccctcttcgtcagctcccaccgtactatctgctgcattaaatgacatagcttccagaatataccc

SEQ ID NO: 78709 - DNA, 110 bp, synthetic construct
  source 1..110: mol_type = other DNA
aatttgagaacctgatcatgacccagtagaccaatttcttaacacattcccaatctgtacttctaaagaaatcagagaacttattgcacatgtctactaggaaacatgcg

SEQ ID NO: 78710 - DNA, 110 bp, synthetic construct
  source 1..110: mol_type = other DNA
ttattttggacccatctcttccactgcaatatgagctctttaagaggagtaatcggatcctgagtaatctttgtattcctggcatttaggtagatgctcaaaaattattt

SEQ ID NO: 78711 - DNA, 110 bp, synthetic construct
  source 1..110: mol_type = other DNA
tatctcttgggccatccagagcatcaaaggagattgcttatgaacagctagtttgcacatgaaagacttattcttagcagtcagtataagaaagtgtctgatattgtttt

SEQ ID NO: 78712 - DNA, 110 bp, synthetic construct
  source 1..110: mol_type = other DNA
gtaatataacataggtatagcctaactgagaatgtgtggacagttggaaccatgagtgtattactattttttaaatttatattttgtttctgggtcttgagtccacagac

SEQ ID NO: 78713 - DNA, 110 bp, synthetic construct
  source 1..110: mol_type = other DNA
ttgagtagaatatgtgtatttataacattctgtctgtatggaattgtccccaaattgcttatcataatggaaatcacgtccccatttatgctattaaatccataaaacag

SEQ ID NO: 78714 - DNA, 110 bp, synthetic construct; identical to SEQ ID NO: 78713
  source 1..110: mol_type = other DNA

SEQ ID NO: 78715 - DNA, 110 bp, synthetic construct
  source 1..110: mol_type = other DNA
ggggaaaaggagaatagtaagtgtaaacattcctaggagaaaaatgaaaaacaaagtaatagctaagttttaaaatttcatttcattgattccttctgtgatcacacact

SEQ ID NO: 78716 - DNA, 110 bp, synthetic construct; identical to SEQ ID NO: 78715
  source 1..110: mol_type = other DNA

SEQ ID NO: 78717 - DNA, 110 bp, synthetic construct
  source 1..110: mol_type = other DNA
aaatggggagagttgtcatttaaatccttaactgttatgttaaccatagtgtctccagtcactgtccccccactggccactaccttcagctgataaaaggattgctcttc

SEQ ID NO: 78718 - DNA, 110 bp, synthetic construct
  source 1..110: mol_type = other DNA
cagtcactgtccccccactggccactaccttcagctgataaaaggattgctcttctctgtcaatcacacttgctgtggtaagctgcccagtgacctggttgatagcaaac

SEQ ID NO: 78719 - DNA, 110 bp, synthetic construct
  source 1..110: mol_type = other DNA
acattctttagaactttataagcaatagcctagggaatcagagcttagaaaaacactgttgaaatgacatggtctctatgtgttcactccctgaatcatgtgaactgaag

SEQ ID NO: 78720 - DNA, 110 bp, synthetic construct
  source 1..110: mol_type = other DNA
agtaacaagaaagtctacttttagaccacaaggatgccccaggactgggaaccataaggaaatagtggaaggctacagggaagttcaagactataagcagagggattcaa

SEQ ID NO: 78721 - DNA, 110 bp, synthetic construct
  source 1..110: mol_type = other DNA
gtagacttttccacttcatcactttaagtaaactctgccactccctcctggcctgcaaagtttctgctgaaatatcagctgataacattatgggggttgccttgtatgat

SEQ ID NO: 78722 - DNA, 110 bp, synthetic construct
  source 1..110: mol_type = other DNA
aagtaaactctgccactccctcctggcctgcaaagtttctgctgaaatatcagctgataacattatgggggttgccttgtatgatatttgttgtttttcccttgttgctt

SEQ ID NO: 78723 - DNA, 110 bp, synthetic construct
  source 1..110: mol_type = other DNA
agaggttgatatatatctaaatattttaaggttgtaagctccaagctaagcccgtagccatgcttgagtgtctgtcctcccatcccaccatccctgctccctgagccttg

SEQ ID NO: 78724 - DNA, 110 bp, synthetic construct
  source 1..110: mol_type = other DNA
atttctcctgcctccacccttcttcccatcatgttatttatatcctggaatttatatagggactgatgagccaatttgaatcgtgcacatagtgctcaaattcctgtata

SEQ ID NO: 78725 - DNA, 110 bp, synthetic construct
  source 1..110: mol_type = other DNA
atagggactgatgagccaatttgaatcgtgcacatagtgctcaaattcctgtatagaacacttaaagctcaatggctgttgatttccagacatttatttggtacttgaat

SEQ ID NO: 78726 - DNA, 110 bp, synthetic construct
  source 1..110: mol_type = other DNA
ttggggcatctcgtgtggaatttggggagattaattttggggagtgggaatgaggctagcactaacctgcttagctggccgggtgtcacacattgcacagacctcctgtt

SEQ ID NO: 78727 - DNA, 110 bp, synthetic construct
  source 1..110: mol_type = other DNA
ctagcactaacctgcttagctggccgggtgtcacacattgcacagacctcctgtttcctgctctgggacccctcactgttgctgagatgtaaggttctgtgagccctttc

SEQ ID NO: 78728 - DNA, 110 bp, synthetic construct; identical to SEQ ID NO: 78726
  source 1..110: mol_type = other DNA

SEQ ID NO: 78729 - DNA, 110 bp, synthetic construct; identical to SEQ ID NO: 78727
  source 1..110: mol_type = other DNA

SEQ ID NO: 78730 - DNA, 110 bp, synthetic construct
  source 1..110: mol_type = other DNA
caggggcagcctatgaactgataagaactcctcagaggggcaggttctgtcaacacccagaaagagaggaagcctaaaaggaggacccagaaggctctctgtgactgaac

SEQ ID NO: 78731 - DNA, 110 bp, synthetic construct
  source 1..110: mol_type = other DNA
atttaggtgctatctatccaatgcttttcctgacccccttttaactcttcactgcacattctcacttagtgatcttttcctaaagcttaaaaattcgatcaaaacggaca

SEQ ID NO: 78732 - DNA, 110 bp, synthetic construct
  source 1..110: mol_type = other DNA
ttgagaaactgaagatgaaggttgacatcaaattcacagctgccccaggccctctgaaatcttcagtttcctttgacggtgctgtttacactgtggccttgtttggatta

SEQ ID NO: 78733 - DNA, 110 bp, synthetic construct
  source 1..110: mol_type = other DNA
tgttttagtatgggtgcctgttgcctctttcctcagcctgtttttgataataggtgtgcaggtgtggtggctggtgcctggtcatggaattctcagtagtggtggaagct

SEQ ID NO: 78734 - DNA, 110 bp, synthetic construct
  source 1..110: mol_type = other DNA
gtgcaggtgtggtggctggtgcctggtcatggaattctcagtagtggtggaagctcacctgtgcacttacagcatgtgatgggagcagccatggaacatgactgctcctg

SEQ ID NO: 78735 - DNA, 110 bp, synthetic construct
  source 1..110: mol_type = other DNA
ggcttccagcctatggaagaggaccacatggggcctggaaacattcacatggcagagaatttagggatctgcgtgtggttgccaggagcttgttccaaaggaaggcaggc

SEQ ID NO: 78736 - DNA, 110 bp, synthetic construct
  source 1..110: mol_type = other DNA
tagagtgatttctgccactggaacttgaactggcgtgtatgcctcttctctaatcagaagcagcttccctttcagctgtaccagatattctgtttattcactttgtactt

SEQ ID NO: 78737 - DNA, 110 bp, synthetic construct
  source 1..110: mol_type = other DNA
agaagcagcttccctttcagctgtaccagatattctgtttattcactttgtactttggtagtgagtgtcctttagtgaaaacttcatttcccagcgtatcttcagggatc

SEQ ID NO: 78738 - DNA, 110 bp, synthetic construct
  source 1..110: mol_type = other DNA
gactgagatcaatttaaaaaacttcaattttaaggaatgaatgttaaagagaacagggaactctacccaatgttctgggataatctgtacaggaaaagaatctgaaaaag

SEQ ID NO: 78739 - DNA, 110 bp, synthetic construct; identical to SEQ ID NO: 78738
  source 1..110: mol_type = other DNA

SEQ ID NO: 78740 - DNA, 110 bp, synthetic construct
  source 1..110: mol_type = other DNA
gtgatttgatacctcctggagttgggcaaattggtggcccatatctgtgtcatttatcattttgtggtgtacaaagtaggcagtcaatatatatgtgttgaatatgggcg

SEQ ID NO: 78741 - DNA, 110 bp, synthetic construct
  source 1..110: mol_type = other DNA
atcattttgtggtgtacaaagtaggcagtcaatatatatgtgttgaatatgggcgtgtatgaatgaatagctttctactctgaaaatgtgttaaataattcaaactacat

SEQ ID NO: 78742 - DNA, 110 bp, synthetic construct
  source 1..110: mol_type = other DNA
gctgtggttctttctgaaagagcagggaatgtttcgggctatcaagggcagaaggagaaaggtcattgtagctatttcacaatctttttgcttcataatttacttttaac

SEQ ID NO: 78743 - DNA, 110 bp, synthetic construct
  source 1..110: mol_type = other DNA
aaacaattcataagttttacatattgctccatcctgagtagcgtgatgagctctcacaagatcccactcgtcctgccccagacgttaaattactcctttgtccagcatct

SEQ ID NO: 78744 - DNA, 110 bp, synthetic construct
  source 1..110: mol_type = other DNA
gtatctctggtatcctgaatttgtaccctccacttctcattattgctggctttggtagcatattatatatggatgatttcctacctttactatatttttgcctttatttt

SEQ ID NO: 78745 - DNA, 110 bp, synthetic construct
  source 1..110: mol_type = other DNA
ccctccacttctcattattgctggctttggtagcatattatatatggatgatttcctacctttactatatttttgcctttattttattttatgtcttttgtctttttagg

SEQ ID NO: 78746 - DNA, 110 bp, synthetic construct
  source 1..110: mol_type = other DNA
ctgggtctaaaggcatcatccactaaaccaagaggagacttggctgctgcttcccaaggagttagccttttgtttgctttctctagctcatcagttggtttgctagagta

SEQ ID NO: 78747 - DNA, 110 bp, synthetic construct
  source 1..110: mol_type = other DNA
aaggagttagccttttgtttgctttctctagctcatcagttggtttgctagagtagctataagcaggctggtatccccaaggagatgttgtagatatggcaggtgggaca

SEQ ID NO: 78748 - DNA, 110 bp, synthetic construct
  source 1..110: mol_type = other DNA
ggaacaaaagccagagggtttcaaatggtctcaagcatctagctgatctggactgttagggctctgaactcctgaccagctggcgggccccgcatgcctcctcctgatgt

SEQ ID NO: 78749 - DNA, 110 bp, synthetic construct
  source 1..110: mol_type = other DNA
ttagggctctgaactcctgaccagctggcgggccccgcatgcctcctcctgatgtttctctgtcaggccaggtacaccctgctcccatccccagcccccaagatacctgc

SEQ ID NO: 78750 - DNA, 110 bp, synthetic construct
  source 1..110: mol_type = other DNA
atatgtcttggttcatgtcctagaagtcagaggccagaagccccctttttgtgttttagctggaaataaccctaagatatgaaaacaagtagcctactgaaattacctgc

SEQ ID NO: 78751 - DNA, 110 bp, synthetic construct
  source 1..110: mol_type = other DNA
agaatgtgaaagcaaatagcttaaatcagcaaacgctgagtttaccttaaggctcagtgggagacctttaatacattctttttctttggaatgtacatttagtgtcttgg

SEQ ID NO: 78752 - DNA, 110 bp, synthetic construct
  source 1..110: mol_type = other DNA
ctttcattttaatttagataaattagcacagttccatgttgagcattattttccctgctttttcttaaatgattagacagcttttaaacactgtgtaacacataacgtgc

SEQ ID NO: 78753 - DNA, 110 bp, synthetic construct
  source 1..110: mol_type = other DNA
tgttgtgattttccagctatcattctgatacttggtttttgttccactctgacaatctctgtcttttaattgtatggttagactattaatgtttaaaatgcatattgcta

SEQ ID NO: 78754 - DNA, 110 bp, synthetic construct
  source 1..110: mol_type = other DNA
gctatcattctgatacttggtttttgttccactctgacaatctctgtcttttaattgtatggttagactattaatgtttaaaatgcatattgctataattggagtaaggt

SEQ ID NO: 78755 - DNA, 110 bp, synthetic construct
  source 1..110: mol_type = other DNA
ttctggtgaccagaagtacaaaatccagacatcatcagaggcacacttcctatggaaaccctagaggcacattctctccatgcttctaaatgctagtggtttcctacttc

SEQ ID NO: 78756 - DNA, 110 bp, synthetic construct
  source 1..110: mol_type = other DNA
aaaccctagaggcacattctctccatgcttctaaatgctagtggtttcctacttccttgctttgtggccatagcactccaatttctctttgatcttcacatcacctctcc

SEQ ID NO: 78757 - DNA, 110 bp, synthetic construct
  source 1..110: mol_type = other DNA
tgtgagaaaataaatttctattcctaacaccactcaatctctggtattttgttccagcacctgtaacagactactagggtacgttgataacaaatgagtattttatggtg

SEQ ID NO: 78758 - DNA, 110 bp, synthetic construct
  source 1..110: mol_type = other DNA
agcacctgtaacagactactagggtacgttgataacaaatgagtattttatggtgctgagctgtttttggaagtgagcatcatcagttgagctatttacatactgttctt

SEQ ID NO: 78759 - DNA, 110 bp, synthetic construct
  source 1..110: mol_type = other DNA
caaggcacaaagttctcatggccagactccagcagccagcggaatgaacacagagaaaaggaacaccagcccacattcgttcgaggtgcacaggtcttagctaagcactg

SEQ ID NO: 78760 - DNA, 110 bp, synthetic construct
  source 1..110: mol_type = other DNA
aaaaggaacaccagcccacattcgttcgaggtgcacaggtcttagctaagcactgctgagtcatgaatgctcacccatctccaggtgatcaccctactaaattctcaatg

SEQ ID NO: 78761 - DNA, 110 bp, synthetic construct
  source 1..110: mol_type = other DNA
cttgaggagcacctgataattgcctctttctatcagctacattccccagggtagagtgcataatgtaaacgcacatgataaagacaccaatagtgttagattacgtgatt

SEQ ID NO: 78762 - DNA, 110 bp, synthetic construct
  source 1..110: mol_type = other DNA
tccagcatgggtccccaaagccaccataaaaatgctttagagactgcccctcagagagcttggagaaaaatgaaagtgaaatgaagatgacagatctattttcttagcat

SEQ ID NO: 78763 - DNA, 110 bp, synthetic construct
  source 1..110: mol_type = other DNA
ggaaagagaaggtctgcaaagatggacccttaccctgcggaggatgagcagctgaagccacagtctcagccctgatgtcctttgtagaagagactggcctctttgtctgc

SEQ ID NO: 78764 - DNA, 110 bp, synthetic construct
  source 1..110: mol_type = other DNA
tgatttttgtttttctcatttgatgaaataatcaatttccagcaaaggcctgtgttctgcttcatgtcttacttattggtgatatattatgatgtatatgcaagtctcct

SEQ ID NO: 78765 - DNA, 110 bp, synthetic construct; identical to SEQ ID NO: 78764
  source 1..110: mol_type = other DNA

SEQ ID NO: 78766 - DNA, 110 bp, synthetic construct
  source 1..110: mol_type = other DNA
ctttcttctttactatatatgtttccatcatttattccttaacacagggtacctgaagtcttacctacaactatagctctcactcctcaaacagccaattggcaagtctc

SEQ ID NO: 78767 - DNA, 110 bp, synthetic construct
  source 1..110: mol_type = other DNA
aagtcttacctacaactatagctctcactcctcaaacagccaattggcaagtctctctggtttctccttttcaaaactgtctcgcccttcccttttcactgctaccaact

SEQ ID NO: 78768 - DNA, 110 bp, synthetic construct; identical to SEQ ID NO: 78766
  source 1..110: mol_type = other DNA

SEQ ID NO: 78769 - DNA, 110 bp, synthetic construct; identical to SEQ ID NO: 78767
  source 1..110: mol_type = other DNA

SEQ ID NO: 78770 - DNA, 110 bp, synthetic construct
  source 1..110: mol_type = other DNA
ataattactgtccacttttctttctactataatttgtaagactattcactttgataaactttgcaacaccagagctcctaagattcaaaccatcttgactctgaagacca

SEQ ID NO: 78771 - DNA, 110 bp, synthetic construct
  source 1..110: mol_type = other DNA
gaaacaagatgagagcataggcactctgatttcagagctttatttttaaatacgatatgcagtgttctgatacctaattctaatgtgctgtattcaagtaagccaagggt

SEQ ID NO: 78772 - DNA, 110 bp, synthetic construct
  source 1..110: mol_type = other DNA
cggaagttatagaaagggtagtaattaaagaaaatcagaataaatgtgtggtgcgctggtttaaatgctgctttaggagttcttgtgattaagcctcccatatcctttca

SEQ ID NO: 78773 - DNA, 110 bp, synthetic construct
  source 1..110: mol_type = other DNA
gagctgattactaaaacttaaagtacactgctaacctaatcttttgggttcagtttatttacatctctaaatacaggaatctactctgtcttattaactgctgtatttct

SEQ ID NO: 78774 - DNA, 110 bp, synthetic construct
  source 1..110: mol_type = other DNA
gcattttcctacctcgagaaacaggttactagcatcttttcttcaaggagagcgagggctcattgagctgagatgtttggggatttgggggttttgtttttttccttttt

SEQ ID NO: 78775 - DNA, 110 bp, synthetic construct
  source 1..110: mol_type = other DNA
tggcagctggagggagatgacagcagtgctaggttagcaggaacttggagcaaactccatgcagcctaagcagtgctgggggaggggaaggaggaagcccattgtatatt

SEQ ID NO: 78776 - DNA, 110 bp, synthetic construct
  source 1..110: mol_type = other DNA
tcttgggttattatttactgaatgatgtgtggtgatgagcagtatgcagaactggtaaggctggcataacccagggctttgccgctaaggatcctgttttgctacttgac

SEQ ID NO: 78777 - DNA, 110 bp, synthetic construct
  source 1..110: mol_type = other DNA
taaggctggcataacccagggctttgccgctaaggatcctgttttgctacttgacttggagtgtggttcagagtaggagtttctgaaactatgaaaaatgagatgtgtct

SEQ ID NO: 78778 - DNA, 110 bp, synthetic construct
  source 1..110: mol_type = other DNA
atccatggataaagagcaactagacactagtttgtgaagacatacgtatctcattccaaaaaacccaaaatttcacaaggaatacctctacccttgttatggatgccgca

SEQ ID NO: 78779 - DNA, 110 bp, synthetic construct
  source 1..110: mol_type = other DNA
ccaaaaaacccaaaatttcacaaggaatacctctacccttgttatggatgccgcatggtaaacaaaacggatgccatcattacaaagcaaatgagggattgcttcacaca

SEQ ID NO: 78780 - DNA, 110 bp, synthetic construct
  source 1..110: mol_type = other DNA
ggcatacaaccagtacagccacatggggctccatgctcagaaaacccttgcacttggaatttaatactctgtagcctctatctgaaaagacaatctaaggaaaacagggc

SEQ ID NO: 78781 - DNA, 110 bp, synthetic construct
  source 1..110: mol_type = other DNA
ggaatttaatactctgtagcctctatctgaaaagacaatctaaggaaaacagggcttagagaagttaaataatttggctcagatcatccaccaattgagattatttgaat

SEQ ID NO: 78782 - DNA, 110 bp, synthetic construct
  source 1..110: mol_type = other DNA
atgtcgggtgcaccacgagggacaggggaggggggcgaggagcctctgaatgctgcagtccagctcaaaggacaacatcctcttcattacctccttcaacagtaaaactt

SEQ ID NO: 78783 - DNA, 110 bp, synthetic construct
  source 1..110: mol_type = other DNA
tccagaagcaacccacactcagcgacgaacagagctcggtggatacataccgcaatgcctcactccgcaggagggataactgggagttacgtggcccactgtctctcagt

SEQ ID NO: 78784 - DNA, 110 bp, synthetic construct
  source 1..110: mol_type = other DNA
atgtccaagggaaagcggtcagagaatttccatccaagcgcaactcatgcagctgctttaggttgtaaaagctgctggtgtcgaggctggccacagagttgtaagtcaac

SEQ ID NO: 78785 - DNA, 110 bp, synthetic construct
  source 1..110: mol_type = other DNA
ctttaggttgtaaaagctgctggtgtcgaggctggccacagagttgtaagtcaaccacaggtactggagctccaccaggtagtagaaggcctcggcggggaccccacgga

SEQ ID NO: 78786 - DNA, 110 bp, synthetic construct; identical to SEQ ID NO: 78784
  source 1..110: mol_type = other DNA

SEQ ID NO: 78787 - DNA, 110 bp, synthetic construct; identical to SEQ ID NO: 78785
  source 1..110: mol_type = other DNA

SEQ ID NO: 78788 - DNA, 110 bp, synthetic construct
  source 1..110: mol_type = other DNA
taaaaattggtggatttgaatgtttgaaaactaatccatgtcgcaagtccattctgggctttaccatatagtcagagagctacatattgagttccagctatgctgtcttc

SEQ ID NO: 78789 - DNA, 110 bp, synthetic construct
  source 1..110: mol_type = other DNA
tgaatattttctgctagggaaatattttaggggtttaagttagcacatgacctgtttcctctaaacgtctccccttaagtagctcacaggtgatttaatgatggtatgtt

SEQ ID NO: 78790 - DNA, 110 bp, synthetic construct
  source 1..110: mol_type = other DNA
tggtttgcattaggtactgactagtcatgtactaataatgttgttgtaaatccacacggtctgattatttagactgtgatcctaccagctacttctgattccttatagac

SEQ ID NO: 78791 - DNA, 110 bp, synthetic construct
  source 1..110: mol_type = other DNA
tgtttccagagcgcagagtgcctcattcctgatccccgccctgagttcctttcagggtgtgtcgaaggtcagtggtcccagcaacttgtgagttaatccttgcagcggta

SEQ ID NO: 78792 - DNA, 110 bp, synthetic construct; identical to SEQ ID NO: 78791
  source 1..110: mol_type = other DNA

SEQ ID NO: 78793 - DNA, 110 bp, synthetic construct
  source 1..110: mol_type = other DNA
agaaggcacagcacccaagctggtccaataggaccgaagcccggacctccgcttattaagagagaaattctttctcactctagagggctgtgcagttatgtatagagcct

SEQ ID NO: 78794 - DNA, 110 bp, synthetic construct
  source 1..110: mol_type = other DNA
taatgcctttcctccttttccctgtcctttacaaagcaaaaacaacctgtaccccacttcaagggtcatttactcctggaagcttctctgctggcctaagtatccagcta

SEQ ID NO: 78795 - DNA, 110 bp, synthetic construct
  source 1..110: mol_type = other DNA
acttcaagggtcatttactcctggaagcttctctgctggcctaagtatccagctaaggataaattggcagtaagacccaagtcgggagtatataatgggcaaacatacaa

SEQ ID NO: 78796 - DNA, 110 bp, synthetic construct
  source 1..110: mol_type = other DNA
agatgacagcctttatgagtttctcagtgttgccttggtgaagggaaaatccttttgtacctcttggaaacatagtcaactgatagcttctctggtctcatataattcat

SEQ ID NO: 78797 - DNA, 110 bp, synthetic construct
  source 1..110: mol_type = other DNA
tgtacctcttggaaacatagtcaactgatagcttctctggtctcatataattcatctactgtgatctttctacttcttgaaactcctggcccttcccttaatggtcttct

SEQ ID NO: 78798 - DNA, 110 bp, synthetic construct
  source 1..110: mol_type = other DNA
ctcttgctaccatgatagctgttcttagaacactagtcaataaatttctccttttttctccctttatctaaccttctacaggggactttacctttcttagcctcactcca

SEQ ID NO: 78799 - DNA, 110 bp, synthetic construct
  source 1..110: mol_type = other DNA
ttctccctttatctaaccttctacaggggactttacctttcttagcctcactccatggagagaaaagcaaatgacctattttctcaataagttcctgatgcccttgtatt

SEQ ID NO: 78800 - DNA, 110 bp, synthetic construct
  source 1..110: mol_type = other DNA
gttcaatccctggccttgctcagtgggctaaggatttgctattgcagtgtatgtcacagatgtgtcttggatcctgtattactatggctgtggcgtaggctgatagctgc

SEQ ID NO: 78801 - DNA, 110 bp, synthetic construct; identical to SEQ ID NO: 78800
  source 1..110: mol_type = other DNA

SEQ ID NO: 78802 - DNA, 110 bp, synthetic construct
  source 1..110: mol_type = other DNA
cacaaaattttccacctctgggatactttactacttgggaattcctcctttccattctgtattggtgtagcgattcttcagcagctgcgtgaccggcttttggctaatgg

SEQ ID NO: 78803 - DNA, 110 bp, synthetic construct
  source 1..110: mol_type = other DNA
cgcctactgctaaggcacatcttctctctcccacggctgtgcaggtggtttctagaccacgagctctaccttgcattcagccccaggagattccaccctctcaagtgtgc

SEQ ID NO: 78804 - DNA, 110 bp, synthetic construct
  source 1..110: mol_type = other DNA
cccccgccttggcccagcctttgtctttcatcctcaagctttatttttccagcggtgataatgaattttcactaagctagccacaaatttcatgagtaacatatgtggaa

SEQ ID NO: 78805 - DNA, 110 bp, synthetic construct
  source 1..110: mol_type = other DNA
ttcatatccgttaaaaattaaattgagtctcacagtcatgtgttacaaaagaacgtattaaattcctcccaaagatttgctttaaactgagatcagattttcttggctta

SEQ ID NO: 78806 - DNA, 110 bp, synthetic construct
  source 1..110: mol_type = other DNA
tttgtttctgctatatcacagagggaaatcccaggaagctattttaaattctgtgaagccctatggtatttttttgtgattatgatgatcactcctgtgctattttggaa

SEQ ID NO: 78807 - DNA, 110 bp, synthetic construct
  source 1..110: mol_type = other DNA
gtagtcttgtagctttgaagaaacacaaactgtccctggcaataggaggagtggcatttctataagtggcatttctaagaacgcctcagttcttagaacctggtgttcct

SEQ ID NO: 78808 - DNA, 110 bp, synthetic construct
  source 1..110: mol_type = other DNA
atttctataagtggcatttctaagaacgcctcagttcttagaacctggtgttcctacatgggaggattttgggaccgtcaggacagcctgtgggttttgttgctgccgtg

SEQ ID NO: 78809 - DNA, 110 bp, synthetic construct; identical to SEQ ID NO: 78807
  source 1..110: mol_type = other DNA

SEQ ID NO: 78810 - DNA, 110 bp, synthetic construct; identical to SEQ ID NO: 78808
  source 1..110: mol_type = other DNA

SEQ ID NO: 78811 - DNA, 110 bp, synthetic construct
  source 1..110: mol_type = other DNA
tagcaggaacttcctctccaaattccccaacccacagtgggcttatcccagcactagctatctatatgttagacatttactgcatcattgttgataatataggacatttc

SEQ ID NO: 78812 - DNA, 110 bp, synthetic construct
  source 1..110: mol_type = other DNA
agctatctatatgttagacatttactgcatcattgttgataatataggacatttccagtgaacacaccacctgccattccccaaactgttccaacaaagaattcacttac

SEQ ID NO: 78813 - DNA, 110 bp, synthetic construct
  source 1..110: mol_type = other DNA
tttacaattaaagattagacctcccttctgccacttccacctcagaggcgttttcaatgttcgtgtcttcccaggctccaagctcccaatcattctgcagattctccact

SEQ ID NO: 78814 - DNA, 110 bp, synthetic construct
  source 1..110: mol_type = other DNA
aatgttcgtgtcttcccaggctccaagctcccaatcattctgcagattctccactttcctcccatttttctccactgctctctcctccctggattactcagctctgaaca

SEQ ID NO: 78815 - DNA, 110 bp, synthetic construct
  source 1..110: mol_type = other DNA
catttaggttctcatctctcttgagttattctgtcattctcctgaacctggtcgctgggactctggtcttcctctcttcagtctgttttgcagatttctaaagttgctaa

SEQ ID NO: 78816 - DNA, 110 bp, synthetic construct
  source 1..110: mol_type = other DNA
tctgaggaggagctacaggtccttgacgttttttttatggctaaacagttatgattttgtcttgcttgactgtttccctgtgcttctgcattttctcacttttctgatta

SEQ ID NO: 78817 - DNA, 110 bp, synthetic construct
  source 1..110: mol_type = other DNA
tttgtcttgcttgactgtttccctgtgcttctgcattttctcacttttctgattaaatatgttctttggaacttggggaaggcctaggcggctacagcttttctacaaag

SEQ ID NO: 78818 - DNA, 110 bp, synthetic construct
  source 1..110: mol_type = other DNA
ctccccctattctgcctttgcacgtcccatgtccatctccacagttcactttccccttagtgtgtcgccaaacttctgcttatctttcatgactcagctcagggcacttc

SEQ ID NO: 78819 - DNA, 110 bp, synthetic construct
  source 1..110: mol_type = other DNA
cttagtgtgtcgccaaacttctgcttatctttcatgactcagctcagggcacttcctttatgaagcctttcctggacttactttcatatcctgcaaaaaataaatcctac

SEQ ID NO: 78820 - DNA, 110 bp, synthetic construct
  source 1..110: mol_type = other DNA
tccttatatccatgatgcattcaacaaggacctggctcattcatggttaatgggacatagttacggctttaaaatgcttagaggttaactctttgtgaaggtttgggatg

SEQ ID NO: 78821 - DNA, 110 bp, synthetic construct
  source 1..110: mol_type = other DNA
catgggcataagcccaatgtctacatcagccaggaaggcttcctaaactttgactgttttgctttgacagaaatgacatttaaaaatctcttcataaacctaaaacaaag

SEQ ID NO: 78822 - DNA, 110 bp, synthetic construct
  source 1..110: mol_type = other DNA
ttcatgagactgtatgtatgggtagaatgaagcatgagtaggtgtcctgagagcttcagccactcatccatacagttttcttattctttccatacttcgtgaatctaatc

SEQ ID NO: 78823 - DNA, 110 bp, synthetic construct
  source 1..110: mol_type = other DNA
tcagccactcatccatacagttttcttattctttccatacttcgtgaatctaatccagaccataatatttcaatttcataatgactgatcctgcacaatctgatggataa

SEQ ID NO: 78824 - DNA, 110 bp, synthetic construct
  source 1..110: mol_type = other DNA
aaccagttgttcttgtgttccattagctaccccaaaaagcaattgctccttttaccctcaatctctttgatcaaactattgtagactccattcacttaggatctagctga

SEQ ID NO: 78825 - DNA, 110 bp, synthetic construct
  source 1..110: mol_type = other DNA
cctcaatctctttgatcaaactattgtagactccattcacttaggatctagctgatgtcggggtacactaaaatgtgcttgagcccatggtcacgcaccaccacagggga

SEQ ID NO: 78826 - DNA, 110 bp, synthetic construct
  source 1..110: mol_type = other DNA
cgggagcaagtccatctccacattgtataatttcacaatctaatttttgccagtttttttttccaactctttttcatggaatagctacactggctctcttgatttctcct

SEQ ID NO: 78827 - DNA, 110 bp, synthetic construct
  source 1..110: mol_type = other DNA
aggcttcagtgtctcccattccctggatccctcttgtcacactccggcccacatttcttcaagactggaagcacttagggctaaacaaacctgagatccccacacgaaag

SEQ ID NO: 78828 - DNA, 110 bp, synthetic construct
  source 1..110: mol_type = other DNA
tcttcaagactggaagcacttagggctaaacaaacctgagatccccacacgaaagctacatccttttcccgtggtaggcggccttctgctttattcatcccacagacaca

SEQ ID NO: 78829 - DNA, 110 bp, synthetic construct
  source 1..110: mol_type = other DNA
aaaaatcaactaaaatacaacactaaagacaatcatcatccaaggagagtgggcgttgtaaaagaccgccccttcctttctgggagtagtagctcgtccttggtatccag

SEQ ID NO: 78830 - DNA, 110 bp, synthetic construct
  source 1..110: mol_type = other DNA
tatctgctagtgataatgccataatttataaatgatccagctccagactttcattggcaaccctaggactagtgtgttgacaaaaaaatcaacaaaagtcaaataagtgt

SEQ ID NO: 78831 - DNA, 110 bp, synthetic construct
  source 1..110: mol_type = other DNA
attcctgtagaaagcttgttctccagaatttataggcctttgataggcatcaatgaaaaaagctctaatttaaaatgagaaattgctggcctttagacattggcgtggga

SEQ ID NO: 78832 - DNA, 110 bp, synthetic construct
  source 1..110: mol_type = other DNA
tggacccctagcctgggaacctccatgtgccgtggaggtagccctaaaaagacaaaaaaagaaaagccttagcaagtcccagatactgtaataaggtctttacattaact

SEQ ID NO: 78833 - DNA, 110 bp, synthetic construct
  source 1..110: mol_type = other DNA
aaaaagaaaagccttagcaagtcccagatactgtaataaggtctttacattaactacaattagccttataaacatctgtgaggtaggtgctattattatccccattttgt

SEQ ID NO: 78834 - DNA, 110 bp, synthetic construct
  source 1..110: mol_type = other DNA
ctttgtttccctggatgctgcttcaaggtagagttgtatcacaaatgcccatgcagcgagaactggcctctcttctctgtctgtaaatatgcaaatgaaaatgtaccaga

SEQ ID NO: 78835 - DNA, 110 bp, synthetic construct
  source 1..110: mol_type = other DNA
ctggccttgagtttagctctcaccccctcacggatcatcacagctttgacttccttagggattactcacaggagcaagaacagtttgcttcgtgcatggaaagactgaaa

SEQ ID NO: 78836 - DNA, 110 bp, synthetic construct
  source 1..110: mol_type = other DNA
tttcagagatttattgctagaaattatgaccaaacccatgcagcagaacagatctggtcaccattttccttggcgtcagccccaagatgctgcaaaccgaaccatcagtt

SEQ ID NO: 78837 - DNA, 110 bp, synthetic construct
  source 1..110: mol_type = other DNA
cccttttatcctttaggaacatattttgtattgcaaagagtttattaaataagtcttgtagttcccgtcatggcacactggtgcatgaatccgactaggaaccatgaggt

SEQ ID NO: 78838 - DNA, 110 bp, synthetic construct; identical to SEQ ID NO: 78837
  source 1..110: mol_type = other DNA

SEQ ID NO: 78839 - DNA, 110 bp, synthetic construct
  source 1..110: mol_type = other DNA
cccgctgccactgcctagaaacccacgtggtcagaactctgttcaaagtgtcataaatgtgtgtagggtcttgttgcattactggattctcttatcatttataatagctt

SEQ ID NO: 78840 - DNA, 110 bp, synthetic construct
  source 1..110: mol_type = other DNA
actctgttcaaagtgtcataaatgtgtgtagggtcttgttgcattactggattctcttatcatttataatagctttttggtagtttctattgtgttttccaaatattcat

SEQ ID NO: 78841 - DNA, 110 bp, synthetic construct
  source 1..110: mol_type = other DNA
gttgcaggggagcggtggtttgggttttgctgtcttcttcctcctcacagatcgtagcccaaactgctgttagtgtgggagcttctggtctgcagctcaggaacggacca

SEQ ID NO: 78842 - DNA, 110 bp, synthetic construct
  source 1..110: mol_type = other DNA
agcccaaactgctgttagtgtgggagcttctggtctgcagctcaggaacggaccacgtcccacctagtgtatctctggccatgtgccattgtaagcgccctttcttcatg

SEQ ID NO: 78843 - DNA, 110 bp, synthetic construct
  source 1..110: mol_type = other DNA
ttcaatagagacagcgtctactatcaagaaaagaaaaattctgtagagttagacaaatacctaatctcaatttctctatcagtctatctagaaatagttcaggccgtctg

SEQ ID NO: 78844 - DNA, 110 bp, synthetic construct
  source 1..110: mol_type = other DNA
aatacctaatctcaatttctctatcagtctatctagaaatagttcaggccgtctggaactttcatggaagtaggaagtcattcaacaaatgcttgagcactgacaacaag

SEQ ID NO: 78845 - DNA, 110 bp, synthetic construct
  source 1..110: mol_type = other DNA
tgtaaatgaagtaaaatagtatattatagctactcaaaggatctaaattgtctaagttgattgtaacctcatccacctggcagaagcaaaatctaggaccaataaagtgc

SEQ ID NO: 78846 - DNA, 110 bp, synthetic construct
  source 1..110: mol_type = other DNA
gcaagcctccgttgtcagtttaatgaagactcttgaaagaatgggagacttttggtgctttaagagaagcctcgggcgagtcgttacatctgtttagacaaaagattagt

SEQ ID NO: 78847 - DNA, 110 bp, synthetic construct
  source 1..110: mol_type = other DNA
tgctttaagagaagcctcgggcgagtcgttacatctgtttagacaaaagattagtgaacatttatatatccattaccgaaatatttaggctaagtatttgtttatttttt

SEQ ID NO: 78848 - DNA, 110 bp, synthetic construct
  source 1..110: mol_type = other DNA
aggtaggcaaaataatcactatgaaagtttacaaaaatgcctccaagctaagacattcaagcacagatgaaaagttgtaagatttgataaatgaacattttagatgaatg

SEQ ID NO: 78849 - DNA, 110 bp, synthetic construct
  source 1..110: mol_type = other DNA
ggtgccaacaagtccctattatagtggcacagtacccaatatacacatcctgttcctatttatattagttatttattgctgtgttgcaaattaccatgaacttactagct

SEQ ID NO: 78850 - DNA, 110 bp, synthetic construct
  source 1..110: mol_type = other DNA
ggcacagtacccaatatacacatcctgttcctatttatattagttatttattgctgtgttgcaaattaccatgaacttactagctacaaaatcatatttattatctcaca

SEQ ID NO: 78851 - DNA, 110 bp, synthetic construct
  source 1..110: mol_type = other DNA
ttctcttctctcccttggcaaccagaagtcttgtctatgtctgtgagccacttatgctttgtagataagttcatttgtgtatggggtatttatcttcctccttctgactt

SEQ ID NO: 78852 - DNA, 110 bp, synthetic construct
  source 1..110: mol_type = other DNA
catatccatatgttctctctagttctgttgtcatctgtttagttcaacttcagttatcctctgggacactgaaaagggttgccaacacatccttcccatatcctaatcct

SEQ ID NO: 78853 - DNA, 110 bp, synthetic construct
  source 1..110: mol_type = other DNA
catgtttacaaattagatcgctttacattgttaagatgaaaacacttactaaacatcgatccatagagtcagcacaatatctatcaaactcctgaccagatttttttcag

SEQ ID NO: 78854 - DNA, 110 bp, synthetic construct; identical to SEQ ID NO: 78853
  source 1..110: mol_type = other DNA

SEQ ID NO: 78855 - DNA, 110 bp, synthetic construct
  source 1..110: mol_type = other DNA
tggaggaacagggcacactcttcaacttattgacccagttgtgcttaaaaatcgtcgtcttatttatcaatatttgcatctctaattagcaagtgggaaaatatggggtg

SEQ ID NO: 78856 - DNA, 110 bp, synthetic construct
  source 1..110: mol_type = other DNA
tgggggacagttttggagaggatggaggttttcctgatctcctgaaattcaaaatacacctagtcctagtgttagctctgaaagtaaatgtgagttggtcatttaaggaa

SEQ ID NO: 78857 - DNA, 110 bp, synthetic construct
  source 1..110: mol_type = other DNA
acacctagtcctagtgttagctctgaaagtaaatgtgagttggtcatttaaggaaggcagagtaggagttcccattgtgactcagcacaaacgaacccgactagtatgca

SEQ ID NO: 78858 - DNA, 110 bp, synthetic construct; identical to SEQ ID NO: 78856
  source 1..110: mol_type = other DNA

SEQ ID NO: 78859 - DNA, 110 bp, synthetic construct; identical to SEQ ID NO: 78857
  source 1..110: mol_type = other DNA

SEQ ID NO: 78860 - DNA, 110 bp, synthetic construct
  source 1..110: mol_type = other DNA
ttttaatttggtaagcggggatgtacagacagctttctactaccactgtcctaccataaaccaaacaacatggatttttcatcaaaaaggcaatcagtgcgtataatgtc

SEQ ID NO: 78861 - DNA, 110 bp, synthetic construct
  source 1..110: mol_type = other DNA
cctgttgtaaagaatcatgctcaactatcccaatgagcatcaattaattaccctatcatgtgcctgacactgaggaagacacccaacactcaacaaggatcaacatcata

SEQ ID NO: 78862 - DNA, 110 bp, synthetic construct
  source 1..110: mol_type = other DNA
gaaacataatgacttcttttcttctcacccaaagagacacatcagccacttaagcagaccatgagatgtactgacctggtaggcccccaaacctcctctcatctaagagg

SEQ ID NO: 78863 - DNA, 110 bp, synthetic construct
  source 1..110: mol_type = other DNA
catgcatagactcctcaattataaatatactcccaccgaagtggtatttgataaacctatattcacacatcataatcacccccaatccatagttaatattatgcttcaca

SEQ ID NO: 78864 - DNA, 110 bp, synthetic construct
  source 1..110: mol_type = other DNA
cctatattcacacatcataatcacccccaatccatagttaatattatgcttcacacgtggtggtgtccactctctggattggaagagtatataatgatttatacccatca

SEQ ID NO: 78865 - DNA, 110 bp, synthetic construct
  source 1..110: mol_type = other DNA
ccctgagtgactggatgccaacacctcagctgcccagaacccccgctggcccaagagtgtgccttgcagagttaagaaaactctgccctaggtgccttgctcatagtagg

SEQ ID NO: 78866 - DNA, 110 bp, synthetic construct
  source 1..110: mol_type = other DNA
tttgtggtttagggccggagaccagaagagctcattcatgaacatgaacctggaatgtttctccgtctgcaaagcagaggcgaagcttgctgatggagacagtgagctga

SEQ ID NO: 78867 - DNA, 110 bp, synthetic construct
  source 1..110: mol_type = other DNA
tacaatcacactcttgagatcctttctggttttaatgttctttgatcctctatttagtcaataaatagtttttaaaagctccctaagtcacgttttatagctactcctct

SEQ ID NO: 78868 - DNA, 110 bp, synthetic construct
  source 1..110: mol_type = other DNA
cggccaaggttttgcctcttaatggaacagttattctttggcagagctcagtcagatcactacagtgaattgccagcaagatatacatgtgtgatgcgaacaggcttctg

SEQ ID NO: 78869 - DNA, 110 bp, synthetic construct
  source 1..110: mol_type = other DNA
tttatgacgtatattatatgtaaagtaaggtgggaggaaaaaagttggaaaacatatcgtcaagtcatagcatttactagattctctccatcatataatccttctaagat

SEQ ID NO: 78870 - DNA, 110 bp, synthetic construct; identical to SEQ ID NO: 78869
  source 1..110: mol_type = other DNA

SEQ ID NO: 78871 - DNA, 110 bp, synthetic construct
  source 1..110: mol_type = other DNA
tacccaagcacttagaatatacctccatattctgagcaaacggatcctttggatcacatagtgtcgaagagattcgatggttccacggaaacatcgctgacttatattct

SEQ ID NO: 78872 - DNA, 110 bp, synthetic construct
  source 1..110: mol_type = other DNA
acatagtgtcgaagagattcgatggttccacggaaacatcgctgacttatattctgggggactggaaatgtctgccgaatgatcgttaaccttccaattgaccttcttac

SEQ ID NO: 78873 - DNA, 110 bp, synthetic construct
  source 1..110: mol_type = other DNA
gcatatgcagcagtccacccaaggcttcactgtacagaggagccagttctttttatctcactgctctgaaacctaccagtttgtagtccttacctgcatggtcaaaactg

SEQ ID NO: 78874 - DNA, 110 bp, synthetic construct
  source 1..110: mol_type = other DNA
tctcactgctctgaaacctaccagtttgtagtccttacctgcatggtcaaaactggctcttagccacagcattactttagctcactgaaaagggagaagtgtgcatctgg

SEQ ID NO: 78875 - DNA, 110 bp, synthetic construct
  source 1..110: mol_type = other DNA
gagagatccttccaaattacacacactgattaaacagaaccctggactataccagagaataaactatatgcatgcaccattatagtcttatagccaagaacaagattatt

SEQ ID NO: 78876 - DNA, 110 bp, synthetic construct
  source 1..110: mol_type = other DNA
agaataaactatatgcatgcaccattatagtcttatagccaagaacaagattattcttcccctgcaagatcaaaaatctattaattagagcactgaaaatatgtatggct

SEQ ID NO: 78877 - DNA, 110 bp, synthetic construct
  source 1..110: mol_type = other DNA
ttaaactttttgcttttctttatggaatatttactttgaaaaactccaaatatacattaatttaatcatctatcttccttccctggccactgagggctcctggggaaaaa

SEQ ID NO: 78878 - DNA, 110 bp, synthetic construct
  source 1..110: mol_type = other DNA
ttagagaaggggaagaacaggagtagggagagagagcctgcagactgcaataccgatctaacatttgttcaagaagagaaggaaggaagaggaaacagggagtacaaaga

SEQ ID NO: 78879 - DNA, 110 bp, synthetic construct
  source 1..110: mol_type = other DNA
aaaatgaaggctttcgttgtgaaaatatgtgggtatgggtatgtaattggggtggagggagggagagcttgggagcaagagcttaggagcacatcacagaatccactata

SEQ ID NO: 78880 - DNA, 110 bp, synthetic construct
  source 1..110: mol_type = other DNA
aattccaaaaatgaattatattattcagctttggtgtggtaacaaagaacaccttcatcttagtggcccaatggcagatatttctctcacacattatataactgctgcat

SEQ ID NO: 78881 - DNA, 110 bp, synthetic construct
  source 1..110: mol_type = other DNA
tgttttattttgcctcaagagtggtaggtcttctagcactagagtgtgtaccctggaaacaggaagcctcgtatattctgccgtttgaggccatttttactttagccatc

SEQ ID NO: 78882 - DNA, 110 bp, synthetic construct
  source 1..110: mol_type = other DNA
gaaacaggaagcctcgtatattctgccgtttgaggccatttttactttagccatctgggaaagcactgaactgaggtgactatttcagctttgcttgaattataatgtgg

SEQ ID NO: 78883 - DNA, 110 bp, synthetic construct
  source 1..110: mol_type = other DNA
ttcccctggtttcttctcatgctttgcctccaactggaggcatctagctcgccaagatcaaagtgtccctcaagcttattaccttctgtacaagacttccttcttcttaa

SEQ ID NO: 78884 - DNA, 110 bp, synthetic construct
  source 1..110: mol_type = other DNA
gatcaaagtgtccctcaagcttattaccttctgtacaagacttccttcttcttaacaaaggtcacttctccctctgcttgtctttttagacctaataaaggtcaaagcca

SEQ ID NO: 78885 - DNA, 110 bp, synthetic construct
  source 1..110: mol_type = other DNA
ttgggaagaaatgatagcaattttgttcttccaagctctctatcacaccactgcccccaccacacccacccaattcattcttcataaggaacttggacagggaattcccc

SEQ ID NO: 78886 - DNA, 110 bp, synthetic construct
  source 1..110: mol_type = other DNA
cccaccacacccacccaattcattcttcataaggaacttggacagggaattcccctgatggcacagcaaaatgaatccaactagaattcatgaggatacaagttctatac

SEQ ID NO: 78887 - DNA, 110 bp, synthetic construct
  source 1..110: mol_type = other DNA
aaagagagatttaggaaatatgtgctgtggaactagatctttggaggatttccctccaaaccattcctctgaacacagattatgctcagatctagtctagaaagcaaaga

SEQ ID NO: 78888 - DNA, 110 bp, synthetic construct
  source 1..110: mol_type = other DNA
ccaaaccattcctctgaacacagattatgctcagatctagtctagaaagcaaagaaaggatgagtccactgaagactctgaggatagactctgctttataaagtattcag

SEQ ID NO: 78889 - DNA, 110 bp, synthetic construct
  source 1..110: mol_type = other DNA
catgcagaaatctggaggaaaggtaaaagagttgtgtacctcaatttccacatctgcacaatgtgagtaagaataatgtctaatttaggggttccttgtgaagattaaat

SEQ ID NO: 78890 - DNA, 110 bp, synthetic construct
  source 1..110: mol_type = other DNA
ttactgcattcagtttgacattgaggcaagttatcacttctaaataagaatcagatatgatcaggaaaattacctttttatgtgctattgcttttaaaaactgcctacat

SEQ ID NO: 78891 - DNA, 110 bp, synthetic construct
  source 1..110: mol_type = other DNA
aagaatcagatatgatcaggaaaattacctttttatgtgctattgcttttaaaaactgcctacatttcaatctgagggccattatttgctaacaatatgatttcatgagg

SEQ ID NO: 78892 - DNA, 110 bp, synthetic construct
  source 1..110: mol_type = other DNA
ggaagaaggaactgaaatccagattggttaagtacctcaatcaaagacaaacagctgcactaatatttatagagctcagtgttcctgataacagaattaactcatccaaa

SEQ ID NO: 78893 - DNA, 110 bp, synthetic construct
  source 1..110: mol_type = other DNA
tgcactaatatttatagagctcagtgttcctgataacagaattaactcatccaaaggtagagactgtcattgtcagagaaaagtcctcattccaaacacaaagactcttg

SEQ ID NO: 78894 - DNA, 110 bp, synthetic construct
  source 1..110: mol_type = other DNA
aaagctattaaattcctaggcattgtcacagtgttatgcaaaataaaatgtctgtgaaactgggcttttttctaaacacttagtggaccatttgagggaaatacaaaatg

SEQ ID NO: 78895 - DNA, 110 bp, synthetic construct
  source 1..110: mol_type = other DNA
aaggaataaagtactgatacacgctacgacatggatgaacctcaaacatatgacgctaagtgaaagaaaatgcaaaaaatcacatttttgcatgattccatttataggaa

SEQ ID NO: 78896 - DNA, 110 bp, synthetic construct
  source 1..110: mol_type = other DNA
gaaccaaagaaataatcattagcaaaacctggtacatgggtctgtcacagaatgcaagaaaaagaaaaacagacttctatcttcagtgattaatctttagtgaaatcttg

SEQ ID NO: 78897 - DNA, 110 bp, synthetic construct
  source 1..110: mol_type = other DNA
aagaaaaagaaaaacagacttctatcttcagtgattaatctttagtgaaatcttggaatgcttttataatttgggggctaaatcaatccctgaccacttcatgcagaata

SEQ ID NO: 78898 - DNA, 110 bp, synthetic construct
  source 1..110: mol_type = other DNA
aagcagggacatttcaaagaaatagggggccacctgctggaaatttcactgatcaaagctgggacaatttgaacaacaaaaacaattaacgtagtattggtttatacggc

SEQ ID NO: 78899 - DNA, 110 bp, synthetic construct
  source 1..110: mol_type = other DNA
aagctgggacaatttgaacaacaaaaacaattaacgtagtattggtttatacggcaaagtataaagtaactatctctgagtctaatcggatatacatgactaaataaaac

SEQ ID NO: 78900 - DNA, 110 bp, synthetic construct
  source 1..110: mol_type = other DNA
agaggagagggagatccttggggaatgaattcatccaaaaaacgtgcaaagtggaggtgaaccttgagctcgtccaccaaagatggatagatctgggtgggcagtgacaa

SEQ ID NO: 78901 - DNA, 110 bp, synthetic construct
  source 1..110: mol_type = other DNA
gggtttgcgtatatgccaaaacctaaagcttcagcaggaggcttctctcaaaaagttccaagagtcatgtcatttaagctgctgaacttatctcttcaaaacctatatca

SEQ ID NO: 78902 - DNA, 110 bp, synthetic construct
  source 1..110: mol_type = other DNA
ttccaagagtcatgtcatttaagctgctgaacttatctcttcaaaacctatatcatcttgcaatataaaagttaatgagattaactcagcacatggctggctgatgtaaa

SEQ ID NO: 78903 - DNA, 110 bp, synthetic construct
  source 1..110: mol_type = other DNA
tagataatcacagttagaggctggaggggcttaagctgccttctctaaacccattgccctgggtgagccagaaaagagggtccggccatatattctctctctctctcaga

SEQ ID NO: 78904 - DNA, 110 bp, synthetic construct
  source 1..110: mol_type = other DNA
gatacaggctgcaacatggatgcacttcagagataggttcattgaaagaagccgcacacaaaaggacacctgtgggatgattctgtttataagcaatggcctagaaaggc

SEQ ID NO: 78905 - DNA, 110 bp, synthetic construct
  source 1..110: mol_type = other DNA
ttgcaggtttcagaatccctttgcttaccagaagccaaaaagcttcaggacctgtccgtgcaaagtttcatgtcctcaagcctttctagtcagggaaattgtgtaaactg

SEQ ID NO: 78906 - DNA, 110 bp, synthetic construct
  source 1..110: mol_type = other DNA
ggcctcaggtctacatcaggccactgttgtactgtttgggtgcttgaggggcgctctcacaggccctttccgaacatggcagtttagttctccaagaccaggagcagaat

SEQ ID NO: 78907 - DNA, 110 bp, synthetic construct
  source 1..110: mol_type = other DNA
ctcacaggccctttccgaacatggcagtttagttctccaagaccaggagcagaatcccctctgccgtctgctaagattgagtcttatacagtgtgacatcatcaggagag

SEQ ID NO: 78908 - DNA, 110 bp, synthetic construct
  source 1..110: mol_type = other DNA
ccggccctaggactccaccaaggagtctcaggtgatctgtgccaggggaggcaggaagcaagaggaggcgactaggcaggtgtgtccacacgactgactttacttaacct

SEQ ID NO: 78909 - DNA, 110 bp, synthetic construct
  source 1..110: mol_type = other DNA
aagcaagaggaggcgactaggcaggtgtgtccacacgactgactttacttaacctgaagtgctccagttctcatcttgtttatggtcctacttaagcgagttcagaaaaa

SEQ ID NO: 78910 - DNA, 110 bp, synthetic construct
  source 1..110: mol_type = other DNA
gtacctggataatagcagctgctgtcaatttccccagtagctttgctgatgccaagaccccctccaaaaggaaggattaacgccctgatgagtatgcagcccccagacct

SEQ ID NO: 78911 - DNA, 110 bp, synthetic construct
  source 1..110: mol_type = other DNA
ccctttagtttttttttttctagttcatctgttaattaacctaattgacaactgatctaatgggtttttttttttggtttgtttttttggcctcacctgcagcagggctc

SEQ ID NO: 78912 - DNA, 110 bp, synthetic construct; identical to SEQ ID NO: 78911
  source 1..110: mol_type = other DNA

SEQ ID NO: 78913 - DNA, 110 bp, synthetic construct
  source 1..110: mol_type = other DNA
ttataactcttacagttgaactctgtaaagcagaggagttgctcttctctttgagtaatttgcatttttactctagttggtgccattaaattatcaacgtgaaatcaagc

SEQ ID NO: 78914 - DNA, 110 bp, synthetic construct
  source 1..110: mol_type = other DNA
ttcaacacaatctatattaaaatcccattgccttttttgtagaaatagaaaagataatgctaagatttatatggaaatgcaagtgacccagaatagccaaaccattttga

SEQ ID NO: 78915 - DNA, 110 bp, synthetic construct
  source 1..110: mol_type = other DNA
ttcatctactaagtaataaaaagttgggaaacctaatggtgggatatttttcgagcacttaagtaaccttttgtaaaacagcgcgtatcagtcattttattaagtagaag

SEQ ID NO: 78916 - DNA, 110 bp, synthetic construct
  source 1..110: mol_type = other DNA
cacttaagtaaccttttgtaaaacagcgcgtatcagtcattttattaagtagaagcttacgtttattttcattggaccaccgaagtgaccttgatcataatgtgcagtag

SEQ ID NO: 78917 - DNA, 110 bp, synthetic construct
  source 1..110: mol_type = other DNA
attttcctgttcctccagttctccccactctacggttaagatcccaaaaatgaaagattataaaggcttgaatatgttcatattcagctacaaaaccctatacaaacgta

SEQ ID NO: 78918 - DNA, 110 bp, synthetic construct
  source 1..110: mol_type = other DNA
gattataaaggcttgaatatgttcatattcagctacaaaaccctatacaaacgtaagatggtcttactgacataactggagagtaaagcacctgggtgcgtcgggaagca

SEQ ID NO: 78919 - DNA, 110 bp, synthetic construct
  source 1..110: mol_type = other DNA
gggttcgctgtgggctcttccagcttcgttggcgtttatagctgttggcagggcgccagggtcatctgtcaccatccttgccatccctgcgaacatcatgggcttgaaca

SEQ ID NO: 78920 - DNA, 110 bp, synthetic construct
  source 1..110: mol_type = other DNA
tatatcctatgctggttgtggtcaggaaaaagacagactggaaaacaagttgtgtatcttaaaacatttactgttgccattaaaaggaaaaaaagatttagtttctctcc

SEQ ID NO: 78921 - DNA, 110 bp, synthetic construct
  source 1..110: mol_type = other DNA
agtcacgggtctccccggtggcttcgtggaagcttctttatgcgacaccacagtgcacgtgtgcaggatgctcaccagcctcctttccttcctcactcaggtcggacctg

SEQ ID NO: 78922 - DNA, 110 bp, synthetic construct
  source 1..110: mol_type = other DNA
cacgtgtgcaggatgctcaccagcctcctttccttcctcactcaggtcggacctgcagggtggctgtggctctgccagcctcgctgtctgtgctctcaatttcttccaca

SEQ ID NO: 78923 - DNA, 110 bp, synthetic construct
  source 1..110: mol_type = other DNA
tttcctcccgagggaccatgaggaagcgagcagagcgaggctttaccttccagcaccagcatgtacggtggattgctgctctacctcctgctgtaatgaatgctgtttcc

SEQ ID NO: 78924 - DNA, 110 bp, synthetic construct
  source 1..110: mol_type = other DNA
gaatctagtgaatttaggatgtccaataattcactggcacagggattgaagaaaatgaagaggaacagggagcaggagaaaattataagccaaattgtcacacgttgacg

SEQ ID NO: 78925 - DNA, 110 bp, synthetic construct
  source 1..110: mol_type = other DNA
tgaagaggaacagggagcaggagaaaattataagccaaattgtcacacgttgacgctctcttctctcacctcctttctctcctttttgctccttacagacttgagtcttt

SEQ ID NO: 78926 - DNA, 110 bp, synthetic construct
  source 1..110: mol_type = other DNA
gaaaaatgggatttctttgatcccaatgtttcataaacttgagtttggttttgaacgtgaacatgaaacagtttagctttggctaattttagacatttggtgaaagtaga

SEQ ID NO: 78927 - DNA, 110 bp, synthetic construct
  source 1..110: mol_type = other DNA
agtatcacttaaatttatgatttagaatgaagtcacaaaagagagcagcttgtgccttggggagaatcaattaggaatttgaataggtactgattcaaaagatctcctca

SEQ ID NO: 78928 - DNA, 110 bp, synthetic construct
  source 1..110: mol_type = other DNA
gaacgatttttcgtatcttcccagagaatacagtctttgttttgttgcccttgctgattgtgaatccccgagaagaaagcttatacgcgttcatccttgggcagcaagca

SEQ ID NO: 78929 - DNA, 110 bp, synthetic construct
  source 1..110: mol_type = other DNA
gattgtgaatccccgagaagaaagcttatacgcgttcatccttgggcagcaagcagtgcctgagtgctatgccttacacataatagtggctcgataaacattgatgaatt

SEQ ID NO: 78930 - DNA, 110 bp, synthetic construct; identical to SEQ ID NO: 78928
  source 1..110: mol_type = other DNA

SEQ ID NO: 78931 - DNA, 110 bp, synthetic construct; identical to SEQ ID NO: 78929
  source 1..110: mol_type = other DNA

SEQ ID NO: 78932 - DNA, 110 bp, synthetic construct
  source 1..110: mol_type = other DNA
taaattaaagataaatctgaatataaccctctgagggtgttctgaaatggcaggattcaaaactctctacagcactagaatagtgataatgcaactctgatgaatattta

SEQ ID NO: 78933 - DNA, 110 bp, synthetic construct
  source 1..110: mol_type = other DNA
aatggcaggattcaaaactctctacagcactagaatagtgataatgcaactctgatgaatatttatctttaatttactgaacaagtccaacaatgaaactgattatgaca

SEQ ID NO: 78934 - DNA, 110 bp, synthetic construct
  source 1..110: mol_type = other DNA
agagaacggctgtgtgcacacgtatgacggaatcactctgttttacggcagcaatgatcacagccttgtaaaccaaccatacctcaagaaaaccttaaaaacggaaaaaa

SEQ ID NO: 78935 - DNA, 110 bp, synthetic construct
  source 1..110: mol_type = other DNA
gatcacagccttgtaaaccaaccatacctcaagaaaaccttaaaaacggaaaaaaaaaaaggtacttaaattgctccacaggaaggaagatgtagaaaaggcaaacatac

SEQ ID NO: 78936 - DNA, 110 bp, synthetic construct
  source 1..110: mol_type = other DNA
tttttctctattttaaaaatattgacttggcctctatgattaaaaagcaaagttcgtattcattttcaccatgcctctgtcagagccactagagacaatgtgtaatccaa

SEQ ID NO: 78937 - DNA, 110 bp, synthetic construct
  source 1..110: mol_type = other DNA
gaaaaccacttgaaactttcagaccctttcctcacttactgatcttgattatctatcttccactgatcttctacagctcaaacaggacttttcttatgctttcaactgca

SEQ ID NO: 78938 - DNA, 110 bp, synthetic construct
  source 1..110: mol_type = other DNA
tcttccactgatcttctacagctcaaacaggacttttcttatgctttcaactgcagcaaattcattacccattgatatttatcatactagactacatcaaaactgcactc

SEQ ID NO: 78939 - DNA, 110 bp, synthetic construct
  source 1..110: mol_type = other DNA
taccatctctgtaattccataagcaaaaggacaccagatatccacaacacttagtacaatgcctggcatgcagtgaagctcaatccatgtgtgatgagttaatgaatttt

SEQ ID NO: 78940 - DNA, 110 bp, synthetic construct
  source 1..110: mol_type = other DNA
acaatgcctggcatgcagtgaagctcaatccatgtgtgatgagttaatgaattttgcaattgatttggtgctagatatccagaagtgaacatgacctctctctgatacct

SEQ ID NO: 78941 - DNA, 110 bp, synthetic construct
  source 1..110: mol_type = other DNA
gtctgttctagaggcaggaaccagttggtatacgccccagggactgagtcactggcaggagccatttatgtgaccttaggcagcctcgttaatgccaacagcaggcatga

SEQ ID NO: 78942 - DNA, 110 bp, synthetic construct
  source 1..110: mol_type = other DNA
caggagccatttatgtgaccttaggcagcctcgttaatgccaacagcaggcatgattttggaattctccaatcacctgttagtggtggagagcatgccccgctgacagaa

SEQ ID NO: 78943 - DNA, 110 bp, synthetic construct
  source 1..110: mol_type = other DNA
cggccagctgtatgtcatcctggaggacacactcaggcacacctgcagggagccctctgtcttttgtctcctcctcctcccttagccccacacaggctgtagctgtgtct

SEQ ID NO: 78944 - DNA, 110 bp, synthetic construct
  source 1..110: mol_type = other DNA
tctgtcttttgtctcctcctcctcccttagccccacacaggctgtagctgtgtctcttgccactttcttttacagcgtatgttgtggtcgtggtttttgtctgacccact

SEQ ID NO: 78945 - DNA, 110 bp, synthetic construct
  source 1..110: mol_type = other DNA
ctttataattcacactttttctcttgctgcctttacaatcctctttaacttttgccatctttattatatgtcttggtatgcacctgcttgtgtgcaacttgtttggggcc

SEQ ID NO: 78946 - DNA, 110 bp, synthetic construct; identical to SEQ ID NO: 78945
  source 1..110: mol_type = other DNA

SEQ ID NO: 78947 - DNA, 110 bp, synthetic construct
  source 1..110: mol_type = other DNA
ccgcccaccgcctgggggcggagactacgagctccaacccctccaagctttgatcgcagaataaagctttgctttgcttctgaactgaacttggtcttgttcgattggct

SEQ ID NO: 78948 - DNA, 110 bp, synthetic construct
  source 1..110: mol_type = other DNA
tgctctcagccgccgtgttctggggcatcttggcgagtgcctattttcatagctgaatttacttttaaaaaacattttaattttactaaggcaaagctaccaagggaagg

SEQ ID NO: 78949 - DNA, 110 bp, synthetic construct
  source 1..110: mol_type = other DNA
aatttacttttaaaaaacattttaattttactaaggcaaagctaccaagggaaggaaaggttgataaagtagctattatactgtggcaaagaaagacgtcggttccttaa

SEQ ID NO: 78950 - DNA, 110 bp, synthetic construct
  source 1..110: mol_type = other DNA
gcctccttccatcgcagcttcccctcgagtagaatgaggatccacaaggcgttatcctcaagtgggccacgagagccgagtgtgcacagccagcggagtcggcgttcaac

SEQ ID NO: 78951 - DNA, 110 bp, synthetic construct
  source 1..110: mol_type = other DNA
cctcaagtgggccacgagagccgagtgtgcacagccagcggagtcggcgttcaacaaatactggtgatcgttatcattatcactgatgcgttctactgacaggtgtttct

SEQ ID NO: 78952 - DNA, 110 bp, synthetic construct
  source 1..110: mol_type = other DNA
aactcaggctccccagagtttccagatgtcactaaatggaactaaaatctcatgtaggtctccctcgtgtctaactgcaagctggaaaaactgggagggcaagcaaatgg

SEQ ID NO: 78953 - DNA, 110 bp, synthetic construct
  source 1..110: mol_type = other DNA
agcacgtttctgtcttcttaggaggacgggaagctcctcgtgggaacctcaccttcacgacctcatctaaaccgaacgacctctccagagctccaccatcgcagggggcg

SEQ ID NO: 78954 - DNA, 110 bp, synthetic construct
  source 1..110: mol_type = other DNA
cacgacctcatctaaaccgaacgacctctccagagctccaccatcgcagggggcgtcagggtcccaccgtgtgagctggggagggcagagggcacagacactccgtcaca

SEQ ID NO: 78955 - DNA, 110 bp, synthetic construct
  source 1..110: mol_type = other DNA
tcttgtttatgaacattcaggcaggctttgcacatcatcctgtcctacttcctgttaacgctgacctgagctcttgtcacaggagtgtttcaaggatgctgttttacatg

SEQ ID NO: 78956 - DNA, 110 bp, synthetic construct
  source 1..110: mol_type = other DNA
ccgaggctgtgtgcccatccgttgcagtgaaagaggcgttcgcttggggctgtagatttgctccttgctgagtgattttctcctccttaaacgaatcaaatggagatcga

SEQ ID NO: 78957 - DNA, 110 bp, synthetic construct
  source 1..110: mol_type = other DNA
tgagtagagttctctgtgctacacagtgggtccttgctgattatctattttatattctctgggagttttataaaagtttacaaaaactagcttctctgctttctcatctg

SEQ ID NO: 78958 - DNA, 110 bp, synthetic construct
  source 1..110: mol_type = other DNA
tctctgggagttttataaaagtttacaaaaactagcttctctgctttctcatctgctcccttcagaccgtccccaacacagcagccaaatgatcttaggtcaccacacct

SEQ ID NO: 78959 - DNA, 110 bp, synthetic construct
  source 1..110: mol_type = other DNA
cactttatggccaccacgcctttgaatgtattgcccctcgtctgccctgttttgttcttgttctcaccccgacctctccagtctgaactatatcattttttactttgcta

SEQ ID NO: 78960 - DNA, 110 bp, synthetic construct
  source 1..110: mol_type = other DNA
tatgatggcgcttatgagtgacctcagaaagacaaactctgaggaacagagcgcagagtagaggttgacagagttggaggctggggggaaatgggagttactggtcagag

SEQ ID NO: 78961 - DNA, 110 bp, synthetic construct
  source 1..110: mol_type = other DNA
atttggggcgtagctctgaaaaggatgatgctaattttacccttagctttattatactgccttccattttacctcaggtatcatttccttcaagaattttatatcctttt

SEQ ID NO: 78962 - DNA, 110 bp, synthetic construct
  source 1..110: mol_type = other DNA
actgccttccattttacctcaggtatcatttccttcaagaattttatatccttttgtgattggcatgataacaaaattggcataaaagatgaaagtgtgatttcatgtgg

SEQ ID NO: 78963 - DNA, 110 bp, synthetic construct
  source 1..110: mol_type = other DNA
cggaggtcgatctaattgtgaaatagttctcacctcgtgaaacatctcagtcagtccatagttgctccgccaaacagccgttagagttatttactccggggaaaactgta

SEQ ID NO: 78964 - DNA, 110 bp, synthetic construct
  source 1..110: mol_type = other DNA
cgatttacatcctatgccaattcttagtagcagtgtgataatataccttaatggacaaaatcccattgacaagataataaaccttatttacatttctgagggaagcagat

SEQ ID NO: 78965 - DNA, 110 bp, synthetic construct
  source 1..110: mol_type = other DNA
ccttaatggacaaaatcccattgacaagataataaaccttatttacatttctgagggaagcagataaggccatttggatttaaatatagaaatatcatttgcatccacta

SEQ ID NO: 78966 - DNA, 110 bp, synthetic construct
  source 1..110: mol_type = other DNA
cttactgtgcttgctgctccaggttaccttaaataaatcttaaagcactgggtaccctaaggatacacctcttttcagggtctttagtttgtagctaatagagggaggaa

SEQ ID NO: 78967 - DNA, 110 bp, synthetic construct
  source 1..110: mol_type = other DNA
cctaaggatacacctcttttcagggtctttagtttgtagctaatagagggaggaaactaaggtaaataaaggtctctagaaattcttgacccattgcgtgactgtcggta

SEQ ID NO: 78968 - DNA, 110 bp, synthetic construct
  source 1..110: mol_type = other DNA
gcgcaccagaagcacgtgcctgtggagggctattcttggagacccctggaatcactcccagccccagaccacacatcttggaatgtcctgtgtggcctcatgccagcttg

SEQ ID NO: 78969 - DNA, 110 bp, synthetic construct
  source 1..110: mol_type = other DNA
tcccagccccagaccacacatcttggaatgtcctgtgtggcctcatgccagcttgtggctattcccaggtctgcaccttcaggaccagaaagtttggtatttttttcatg

SEQ ID NO: 78970 - DNA, 110 bp, synthetic construct
  source 1..110: mol_type = other DNA
tcttcatgtgaattgacccaagatgcaggcatccaccaggaagacaccagcacacgcctaaacgccagccttcaaggccgcgtgggtgaatctcacagcactgctccctc

SEQ ID NO: 78971 - DNA, 110 bp, synthetic construct
  source 1..110: mol_type = other DNA
aagaaataatgccaggtctgagaccattgacaattaagttttttaattttccggcggaggtatctagctttagagagaccgcatcctcacacttagcagaagcggcgaca

SEQ ID NO: 78972 - DNA, 110 bp, synthetic construct
  source 1..110: mol_type = other DNA
atcagtttatgtagaaaaagagaactttggaatgaactttatctgctgatcttctgttagaaagctctttgagctgtactactcttaaggaaaaaaagagccactccctt

SEQ ID NO: 78973 - DNA, 110 bp, synthetic construct
  source 1..110: mol_type = other DNA
gtcaggctatatccttagaaatccagagcgtggtttaaatcttatagccactgacgtctgagaagtgtgttgcatattatctcagattctcagaggggctgttcctggaa

SEQ ID NO: 78974 - DNA, 110 bp, synthetic construct
  source 1..110: mol_type = other DNA
gtctgagaagtgtgttgcatattatctcagattctcagaggggctgttcctggaagctgaagatactcaaaaagtgttccacgatgattcgattattagcagtaggcaga

SEQ ID NO: 78975 - DNA, 110 bp, synthetic construct
  source 1..110: mol_type = other DNA
tatgctgtagacggctcaagctcccggaagatagtgaccacagccatgctcagtgccactaccgtctaggcattgttttaagtaccacatctattagacaatctaaccct

SEQ ID NO: 78976 - DNA, 110 bp, synthetic construct
  source 1..110: mol_type = other DNA
agattcttcagggagagaactagatgatctgcattattaagaaagagcacaagcagctttggagattgttgtgctagcatctaacttcgatgtaaagcaaggaccctgtt

SEQ ID NO: 78977 - DNA, 110 bp, synthetic construct
  source 1..110: mol_type = other DNA
ggagacaatgacccaccaggctcggcgcataccaggtcccgtgtggagctgggtgctggagcagaatctcaaggcggacaagctagaccgaaaggaggattccagggctg

SEQ ID NO: 78978 - DNA, 110 bp, synthetic construct
  source 1..110: mol_type = other DNA
ggagtccagaggcaaatgagaagcacacagctgggaaggaggatccgctgtacctcagcgtccaggccagcattttatagtcaaacgacacgagaatcaacttcaatgcc

SEQ ID NO: 78979 - DNA, 110 bp, synthetic construct
  source 1..110: mol_type = other DNA
cagcgtccaggccagcattttatagtcaaacgacacgagaatcaacttcaatgcctttcttcacaaaagtacattttaccttatgagctgacagggtgttcgaatgttcc

SEQ ID NO: 78980 - DNA, 110 bp, synthetic construct
  source 1..110: mol_type = other DNA
atgcagcttcatcttgaccacccttgcctccgaagacagcaatggtgggccagagcagaacagccacagttaagttggaaacatgttctcactccaccctccatgtaaag

SEQ ID NO: 78981 - DNA, 110 bp, synthetic construct
  source 1..110: mol_type = other DNA
cagaacagccacagttaagttggaaacatgttctcactccaccctccatgtaaaggctgctttatactgggtaattttctgttttctcccctcgccaggtctagtgtctt

SEQ ID NO: 78982 - DNA, 110 bp, synthetic construct
  source 1..110: mol_type = other DNA
gcctgccgtggcagaaaattctccatttcgtaaacagtttgcgccttgctgatggatttaaatagaacttaagcacctggaaatggaatcgccaaaattatgaaaaaaca

SEQ ID NO: 78983 - DNA, 110 bp, synthetic construct
  source 1..110: mol_type = other DNA
aatgctctccgaaaaaaacaacacaaaatgacttgtacaaaagcctggctgctgtcttgatagaaccatgaggccagataggaaagtaatcacgagctttctcccaaaca

SEQ ID NO: 78984 - DNA, 110 bp, synthetic construct
  source 1..110: mol_type = other DNA
gttcgcatcgtggggagtgctctgcatgacactgcctaacatgagtcagaatccttacagtccaaacgctccggaaaagcagttcattaggtctgtgaaagcagttcctt

SEQ ID NO: 78985 - DNA, 110 bp, synthetic construct
  source 1..110: mol_type = other DNA
atatcaccctctggatcaactgcaatgccgaatcatctgcctacttcaagacaatgcttaaaagaatccctcacatttgcatccacttgacattacaagaaacctagcag

SEQ ID NO: 78986 - DNA, 110 bp, synthetic construct
  source 1..110: mol_type = other DNA
caagacctacaaaatccctcctattctttaacatgtcgatgcgtagaaccataagccatctagctatgcaagaacgtatttagaaaccctttctttccttcctacatcga

SEQ ID NO: 78987 - DNA, 110 bp, synthetic construct
  source 1..110: mol_type = other DNA
gggagggcgtctctgtgtccttccggcctcctggaagtgaaaaggccttgcaccagttattggaagaagttccccaggaggcttcaggtgaaagaggtcatttttaaaag

SEQ ID NO: 78988 - DNA, 110 bp, synthetic construct
  source 1..110: mol_type = other DNA
taagactcaactctaagatttacccaaattgttttggagaggtatttttaaagtattactcataagcgttaaagtcggggacaaatgtaaatgtctagcgggcaaacgaa

SEQ ID NO: 78989 - DNA, 110 bp, synthetic construct
  source 1..110: mol_type = other DNA
catttaattctcttaatgagtctgaaacaaaaagctgtaggccttcccgccaccactcttcccccaccctcataaggagaaactaaactttaggaatagagacctggttg

SEQ ID NO: 78990 - DNA, 110 bp, synthetic construct
  source 1..110: mol_type = other DNA
cctgagatttaaatctctggccgtctccaccctagtgtctcaggataatcatttactttcttgacccgcacacttacttagttataaagtaagtgattaaaccataagtc

SEQ ID NO: 78991 - DNA, 110 bp, synthetic construct
  source 1..110: mol_type = other DNA
ttaatgagctcgcattgctcaaactctgttccagggtatggtcaaaagaaaactatccctttatcaacaggtaaggccatcaacttcctaaaataaattcagaaactgaa

SEQ ID NO: 78992 - DNA, 110 bp, synthetic construct
  source 1..110: mol_type = other DNA
cgcttgctctgcggaattgagaggacacgtagacttagaacaatggtaccgtcccattagctgtctctactttggccagttcgcatttacaaacagctaactgggaaaga

SEQ ID NO: 78993 - DNA, 110 bp, synthetic construct
  source 1..110: mol_type = other DNA
cagccaagtagcatcttcgacccccacctctctctctgcttctatcaccacataagtattttcttcctctgaccctcccagctccttcttacaaagacccctgtggtaac

SEQ ID NO: 78994 - DNA, 110 bp, synthetic construct
  source 1..110: mol_type = other DNA
aggacagagctgctctcccagaagcagtgtacctaccagtcacttgcagtcctcgccccagcactggagcctgtcctgctgagcccatcctgcggagcaggtggtcctca

SEQ ID NO: 78995 - DNA, 110 bp, synthetic construct
  source 1..110: mol_type = other DNA
tataatgtatttctttgcctaaacatattgtgatttaaaaaaacaaaacaaaatagacattcctactgtttgttcctggtgccagactgcttcttccaagttgacagact

SEQ ID NO: 78996 - DNA, 110 bp, synthetic construct
  source 1..110: mol_type = other DNA
ttcattttaaagttacacagaaattagaaaatgcacttatctaacacatcacctctgtgatttcatcaatatcactgaagatgagattaagtaggcagtgctatgataat

SEQ ID NO: 78997 - DNA, 110 bp, synthetic construct
  source 1..110: mol_type = other DNA
cgcatcattccctagttgcaattaactgactgcgagatgagggctcgctctatatccttttttccacagattttactatgtggctgtgctagcctctggaaagcatgatt

SEQ ID NO: 78998 - DNA, 110 bp, synthetic construct
  source 1..110: mol_type = other DNA
taacgttttataaaccagctgtgtttttcaaaacagaaatgtaaagagaagaatgctaacattttacatttttggaaagctcgttaatatgtgccttaatagaagactgc

SEQ ID NO: 78999 - DNA, 110 bp, synthetic construct
  source 1..110: mol_type = other DNA
ctaacattttacatttttggaaagctcgttaatatgtgccttaatagaagactgctgggttctcacacctgcttctgcagtaaatctcttgtgatgtcttacttgaataa

SEQ ID NO: 79000 - DNA, 110 bp, synthetic construct
  source 1..110: mol_type = other DNA
cgcagtcaccagtgcggcacatacggtgagggtacactgccactcttaccagcctggtaacaggtaggttacgacccttttctgttcggcactggtcacctcacagccag

SEQ ID NO: 79001 - DNA, 110 bp, synthetic construct
  source 1..110: mol_type = other DNA
tcgttcattgcatctctattctaaaacttgtaccagcattctgccttttcctcatctcaaatgtctttattggtttaattcattgaacatatattttattgagtactatt

SEQ ID NO: 79002 - DNA, 110 bp, synthetic construct
  source 1..110: mol_type = other DNA
tagtttggagtgggcttgtactgactgatccataggctccctctctgccaagaatttatttctaatcttttttggttttttaccccatcagctcaaatataacaaccatg

SEQ ID NO: 79003 - DNA, 110 bp, synthetic construct
  source 1..110: mol_type = other DNA
ttatttctaatcttttttggttttttaccccatcagctcaaatataacaaccatgtgaaaaaagcctcatagattcatgcgccttagtagacattgaatccaagtaggaa

SEQ ID NO: 79004 - DNA, 110 bp, synthetic construct
  source 1..110: mol_type = other DNA
caagatactaagagaggtacaggacgaggctcgacagaaccactctgtttaaagctgccttggagttcctgtcgcggctcagtggttatcgaatttgacaaggaaccatg

SEQ ID NO: 79005 - DNA, 110 bp, synthetic construct
  source 1..110: mol_type = other DNA
cattttccctgcaatcacgatgattccttcacattcttcaagcctgtgttcagtgtcccctcagtgagagcttccttgctcacttcatttcacactgtacgtccaagccg

SEQ ID NO: 79006 - DNA, 110 bp, synthetic construct
  source 1..110: mol_type = other DNA
gtaagtcacagatttggcctgaatctgatgctgccggggctgtggcattaagtccagctgtggctccaattagacccctggctcatgcacttccatatcccatgggtgta

SEQ ID NO: 79007 - DNA, 110 bp, synthetic construct; identical to SEQ ID NO: 79006
  source 1..110: mol_type = other DNA

SEQ ID NO: 79008 - DNA, 110 bp, synthetic construct
  source 1..110: mol_type = other DNA
ataatttcaagagccaaaggatttttacattttgttttagtaaagaagttgacaaagcaaatactatacctccttcacctgtatgaaataggaggcatagcaagggtaag

SEQ ID NO: 79009 - DNA, 110 bp, synthetic construct
  source 1..110: mol_type = other DNA
agcaaatactatacctccttcacctgtatgaaataggaggcatagcaagggtaagtcatcgcagtggcagcatcaggaccaggctgaggctcctcactgtgtcctcctgt

SEQ ID NO: 79010 - DNA, 110 bp, synthetic construct
  source 1..110: mol_type = other DNA
attcaatggattatagcgtgttaatatcattatttattttgcagctccgatttggctactggagcctctttaagctggctcttgccctttgacatgtgactgctgttttc

SEQ ID NO: 79011 - DNA, 110 bp, synthetic construct
  source 1..110: mol_type = other DNA
actcacctcaccgtctctgtgtcttctccacgtgcctgacttgtaaggatactcgtccttggacttagagtccactcagctaattcaggatgatctcctcatctcaaaat

SEQ ID NO: 79012 - DNA, 110 bp, synthetic construct
  source 1..110: mol_type = other DNA
ttttcattgctctttcattgaagggcctggtaaacagctttcctgggttagacggtaccttaggagagaccctgaggcttgtccgccgtgctggatgaaggcctgagcac

SEQ ID NO: 79013 - DNA, 110 bp, synthetic construct
  source 1..110: mol_type = other DNA
agcccttgcagtcagtgctgcttccggctgctgcttgaccccaagctgtggtgcagagctggcctcttgtcagatgaggagaagggagcatgaggagtttgagtcggttc

SEQ ID NO: 79014 - DNA, 110 bp, synthetic construct
  source 1..110: mol_type = other DNA
cgtttgacttcctgccgtgaggactgagttgtagctcccgccaggcccccttctccagtgcacacagtgtagttttatcacgatttaagtccgcatgtgagcttacatac

SEQ ID NO: 79015 - DNA, 110 bp, synthetic construct
  source 1..110: mol_type = other DNA
aaaccaggttccagttactcccaggggcacgcttttgagacccgtgaaagaagaccggagttggcagagaaaaacgtgcttttccgttaggtgtgcggaggagcaggtgc

SEQ ID NO: 79016 - DNA, 110 bp, synthetic construct
  source 1..110: mol_type = other DNA
ataagggacggcctctcagcttgaatttcttggagggaggaggaagaaggaagcgcagacagaagcacatccgccactctctgagatggaattgcaggcttcagttaatg

SEQ ID NO: 79017 - DNA, 110 bp, synthetic construct
  source 1..110: mol_type = other DNA
gggtggaagtgaaaagacaacgtcaggttcattaagttaacgccatgagttcgttagggccgcatcaggtaacaaatggggcaaaccgagtggcttcaacagcaggcacg

SEQ ID NO: 79018 - DNA, 110 bp, synthetic construct
  source 1..110: mol_type = other DNA
tccttaatccttgctttgtcttccttcccgaacttacgtaacatacttgcgtgcctttccctatctgcttttacaaaaataaacaccatgaggttagggagttggtccat

SEQ ID NO: 79019 - DNA, 110 bp, synthetic construct
  source 1..110: mol_type = other DNA
tgtctcccctagtcgtttccttaatggccgcacaacggtccatctcgtgcggtttttgctaggctgcaggtcctcattagagggttggggaagcaatttagtggggcttt

SEQ ID NO: 79020 - DNA, 110 bp, synthetic construct
  source 1..110: mol_type = other DNA
tggtccttgggccgggtcgggtgtttttagtgggtggttgagtaagcgctcttagaagccatgactgcttcactaaagcaacagttccccacgtaggattggtgccgtcc

SEQ ID NO: 79021 - DNA, 110 bp, synthetic construct
  source 1..110: mol_type = other DNA
aagccatgactgcttcactaaagcaacagttccccacgtaggattggtgccgtcctgttagttcctgttggatgttgtgacacccctcttacctcagctcctggcatata

SEQ ID NO: 79022 - DNA, 110 bp, synthetic construct
  source 1..110: mol_type = other DNA
cagcacttggagagaagaagcctggcttacttgttggccaggtccagtcggacgctctgttaggaggagcaaatattttattcatctttctgtcaagaccccaggagggt

SEQ ID NO: 79023 - DNA, 110 bp, synthetic construct
  source 1..110: mol_type = other DNA
aatgcaccttaaaggtggcggccagtactggagtttctcggccctttggctttgcagttcacgagccagttaacacttatttcatgccttctacgtgcgaactcactgcc

SEQ ID NO: 79024 - DNA, 110 bp, synthetic construct
  source 1..110: mol_type = other DNA
agcgagaggctttccgcaagtctgtggcctccaagagcatccgccgctttctcgaagttttcatggagtctcagatgtttgccggcttcatccaagacagggagctgaga

SEQ ID NO: 79025 - DNA, 110 bp, synthetic construct
  source 1..110: mol_type = other DNA
agttttcatggagtctcagatgtttgccggcttcatccaagacagggagctgagaaagtgtcgggcaaagggtaaggccagccgagcctggactgggcttccatccggag

SEQ ID NO: 79026 - DNA, 110 bp, synthetic construct
  source 1..110: mol_type = other DNA
ggtagctgggtatagacttaaagtgggagatcaagcaggtttgtttgtttggtttttttgagaggcaagggcccatttaatgttcaacctacttaccgatcgcaccacgt

SEQ ID NO: 79027 - DNA, 110 bp, synthetic construct
  source 1..110: mol_type = other DNA
ttttgagaggcaagggcccatttaatgttcaacctacttaccgatcgcaccacgtcaatgataggagcagctccggtcttgttcttggcagcatttatccgtgtctgctc

SEQ ID NO: 79028 - DNA, 110 bp, synthetic construct
  source 1..110: mol_type = other DNA
ctctcccgtgcggcctagagccagatttgagccatgtttgccacgaggccccaagaacgtgggttgggacttagcaaagccagatttgggttgccaggctggtgggtagc

SEQ ID NO: 79029 - DNA, 110 bp, synthetic construct
  source 1..110: mol_type = other DNA
ttccgggctctgaggccgagacctaaactggagaaggtggaattagcattgttcgtggctggaaaaagggaccgaagcctccgtaaggggatacggagagctctgtgtcc

SEQ ID NO: 79030 - DNA, 110 bp, synthetic construct
  source 1..110: mol_type = other DNA
tggctggaaaaagggaccgaagcctccgtaaggggatacggagagctctgtgtccagcctccatcccggctccggcctcaggagctgagcggatctgtggtgtcagcctg

SEQ ID NO: 79031 - DNA, 110 bp, synthetic construct
  source 1..110: mol_type = other DNA
aaattcagagtttttcaaattctagaaagacggtatggtatataaaccgaatctcttccagtggggtccagagctgcaccctgtaatcaaacacattaattttcctctag

SEQ ID NO: 79032 - DNA, 110 bp, synthetic construct
  source 1..110: mol_type = other DNA
ttccagtggggtccagagctgcaccctgtaatcaaacacattaattttcctctaggagatggtgtcactcgaagtgggatgaatgaatactgtacatgtgtttgtgtcag

SEQ ID NO: 79033 - DNA, 110 bp, synthetic construct
  source 1..110: mol_type = other DNA
gagtgtgtcttcagaggtgtgtgtgtaagttactagtataaagtgtgcatatacaataatacttgttatatgtaaatgtgagctacccttcttctgcatgaatggcagta

SEQ ID NO: 79034 - DNA, 110 bp, synthetic construct
  source 1..110: mol_type = other DNA
gcctggcggtggtgttcaaagccctgcttctagttatcctacgggccagctgctcgtgcactttctggagttctgtgaggtactctggtgtcctttcagcacgttccttt

SEQ ID NO: 79035 - DNA, 110 bp, synthetic construct
  source 1..110: mol_type = other DNA
gtgcactttctggagttctgtgaggtactctggtgtcctttcagcacgttccttttatctaagccagttcgaggtaggcttctgccatgagtgtgtggctaaaagttctg

SEQ ID NO: 79036 - DNA, 110 bp, synthetic construct
  source 1..110: mol_type = other DNA
acaaaactgacaacctccctgaacaaagctgtgctgatctttattccttttcatttcaaatgtatatagcgcatcggatttgcaaaatgtaggggcgcaggcagccccca

SEQ ID NO: 79037 - DNA, 110 bp, synthetic construct
  source 1..110: mol_type = other DNA
ttttttgctttgctcattttgtaaaatcgcttaggatcttgatgcttattcacattaagctcctacttagggagaaatctttctccatcttgccagcctcctgtgtagag

SEQ ID NO: 79038 - DNA, 110 bp, synthetic construct
  source 1..110: mol_type = other DNA
taagctcctacttagggagaaatctttctccatcttgccagcctcctgtgtagagacttctcctctcttaagggaggtcagtggactttctttcctgttgtcttgggctg

SEQ ID NO: 79039 - DNA, 110 bp, synthetic construct
  source 1..110: mol_type = other DNA
ctcctcttcctggtgagtcttctctcttcttttgtttaccttgtaaaagaaccagcgcttggttttattgaaattttctatcgtttttttgaatctctattttattgatt

SEQ ID NO: 79040 - DNA, 110 bp, synthetic construct; identical to SEQ ID NO: 79039
  source 1..110: mol_type = other DNA

SEQ ID NO: 79041 - DNA, 110 bp, synthetic construct
  source 1..110: mol_type = other DNA
tgtgccccgtcgtattctggatatcatccaggcgtctcgtccaagctttctctactagtctgacttacgaacaaatatgcttgcggtgtgtctggttaaacaggaacgat

SEQ ID NO: 79042 - DNA, 110 bp, synthetic construct
  source 1..110: mol_type = other DNA
cggcgttttccgcacgcatgcacacgctcacacgcgcacacacatgtacgcacatgcagctgctgtatgttcacgtgtatacaataagacacatacatacacatccaagc

SEQ ID NO: 79043 - DNA, 110 bp, synthetic construct
  source 1..110: mol_type = other DNA
gcagctgctgtatgttcacgtgtatacaataagacacatacatacacatccaagcgaacgtcttttggagtcttggattatgtctgtgcttgtcactgcatctgacctaa

SEQ ID NO: 79044 - DNA, 110 bp, synthetic construct
  source 1..110: mol_type = other DNA
cccctgctcttcatccccaggtagttcatttcctccacttggcagagactgagtatctgaattcctggggactgggcctgagctcctgttatcggggttcttcggagagg

SEQ ID NO: 79045 - DNA, 110 bp, synthetic construct
  source 1..110: mol_type = other DNA
accctgagggcttttctgcagacggtggcagaaatcacagcggaggcagacgcaggtgcccggccacggctctgctgccctccgaggtggtggccgaggcccccgtgggc

SEQ ID NO: 79046 - DNA, 110 bp, synthetic construct
  source 1..110: mol_type = other DNA
ataaaacatactgttaaattagtttaatcttttcagtgtaactactggaaactttagagggcacccctgtggcttgcagtgtgtttctgtcggagacaccagtccatgtg

SEQ ID NO: 79047 - DNA, 110 bp, synthetic construct
  source 1..110: mol_type = other DNA
agagggcacccctgtggcttgcagtgtgtttctgtcggagacaccagtccatgtggcttgtgtgcaggagggttctagaatctatgacatgcggtatggctgggaaggcg

SEQ ID NO: 79048 - DNA, 110 bp, synthetic construct
  source 1..110: mol_type = other DNA
tgtcgctgtctctgcctgtctcttcctgggggcttcacctctctctctccacagagcagtttcatccatgtggccaagaataggggccttgactttgacatctcgtagct

SEQ ID NO: 79049 - DNA, 110 bp, synthetic construct
  source 1..110: mol_type = other DNA
gcagtttcatccatgtggccaagaataggggccttgactttgacatctcgtagcttcagccaccagagaaggacgaactcacatctcctgatcccacgttcaaaagcccc

SEQ ID NO: 79050 - DNA, 110 bp, synthetic construct
  source 1..110: mol_type = other DNA
ctgtccctcttggggccctcgatccttatggcaggtttgtccatgcctgagtcgcagctgtggaccgcgttccgtgacttttaccaaaatgctggaggcgcacatcaatt

SEQ ID NO: 79051 - DNA, 110 bp, synthetic construct
  source 1..110: mol_type = other DNA
actccagtaccgtgtgtgcccatgagtagagcacagctccacacagacgtaacagacagggccgtgcatgagccatgcgcattgtgtcgtggccatgcgtgcatttttac

SEQ ID NO: 79052 - DNA, 110 bp, synthetic construct
  source 1..110: mol_type = other DNA
gcagaggcgttggagccttaatgtacaaggcagtggaggggtaacaggttctcgagcaggacgcagcacacagggaaggaggccggaagaaaagcactccagttctcgga

SEQ ID NO: 79053 - DNA, 110 bp, synthetic construct
  source 1..110: mol_type = other DNA
cctgtgctgccaggctcggagacaggctggactggatggacaggagagtgacctagaagcggctttagcctgagagttgggctgagctgcagccacagagctggctacgc

SEQ ID NO: 79054 - DNA, 110 bp, synthetic construct
  source 1..110: mol_type = other DNA
gaagcggctttagcctgagagttgggctgagctgcagccacagagctggctacgcaaaggcaggctcccgagagagatgcccagaggccagtcctgaccctgccccccac

SEQ ID NO: 79055 - DNA, 110 bp, synthetic construct
  source 1..110: mol_type = other DNA
accgtccattctatgtagagtagtgtgcacacgccagtccccaagcccctgccacgtgatccctttggggacaaaccataagttcgttttcatagactgtgagtctgcaa

SEQ ID NO: 79056 - DNA, 110 bp, synthetic construct
  source 1..110: mol_type = other DNA
cgtctgaagtcaggatcaggagaagggagattcctgagtggaggctggccgaggaggatacagcagaagcagctcccaggcgcagggctggctgtctcacccctgcctgc

SEQ ID NO: 79057 - DNA, 110 bp, synthetic construct
  source 1..110: mol_type = other DNA
gtatttaattttcctcagtaggctttcccctctgaacccaaagcagacaaccacggaagagtccaaaagcaagctttgctctcggtgtggggagaaggcagcaacctgcc

SEQ ID NO: 79058 - DNA, 110 bp, synthetic construct
  source 1..110: mol_type = other DNA
accaatcccgcagttaaagtgaggtggagaaacccctagtgtttctattccggcttagcttcctacgagctgtggcccaacctctcagctttcgtctccttgtctacatc

SEQ ID NO: 79059 - DNA, 110 bp, synthetic construct
  source 1..110: mol_type = other DNA
cgttgcatcctcttccccgtccgtttccgtagttactgggctcccctgaggccacgttctcctctgcaagctgctcaagtgaggatgctcttcctcttgctcttggtgcc

SEQ ID NO: 79060 - DNA, 110 bp, synthetic construct
  source 1..110: mol_type = other DNA
gttctcctctgcaagctgctcaagtgaggatgctcttcctcttgctcttggtgcctctgggcctggtggtggatgggattccttctcccgtgtcgctccttgtagacatt

SEQ ID NO: 79061 - DNA, 110 bp, synthetic construct
  source 1..110: mol_type = other DNA
tttaccgctactgtagccgagtcagtttcaagatttcagtgcctcctgaagacccacgtttcccagctagtccccaccctcgacaccctgcctaaatccctaaaactggc

SEQ ID NO: 79062 - DNA, 110 bp, synthetic construct
  source 1..110: mol_type = other DNA
acgtttcccagctagtccccaccctcgacaccctgcctaaatccctaaaactggctaaacctaaatcctggtcctgagcactctgccagcactcgggatctcgatttccc

SEQ ID NO: 79063 - DNA, 110 bp, synthetic construct
  source 1..110: mol_type = other DNA
ggtcttccttacctagagtcaactgatcaggggctcttgttacatctgcaaaaccccttcagggccacgtctagattaatgtatgattgaataacagggggctgcagccc

SEQ ID NO: 79064 - DNA, 110 bp, synthetic construct
  source 1..110: mol_type = other DNA
ccttcagggccacgtctagattaatgtatgattgaataacagggggctgcagcccagccaagctgccacatcagaaaagccatcacatggagccagatggaatgttggtt

SEQ ID NO: 79065 - DNA, 110 bp, synthetic construct
  source 1..110: mol_type = other DNA
atcagtctttaagttacagggtccagagataagaaacaaagctacaaataaaaaatccagatggaaccagctgggaagaagacgtcaatgaatctgatctccagcagctg

SEQ ID NO: 79066 - DNA, 110 bp, synthetic construct
  source 1..110: mol_type = other DNA
tccagatggaaccagctgggaagaagacgtcaatgaatctgatctccagcagctgagtctccttacaccctgatttcaccacattagcatattaaataacacacccgcca

SEQ ID NO: 79067 - DNA, 110 bp, synthetic construct
  source 1..110: mol_type = other DNA
tggtctggggacaatgcctgcagagggacacagctgtgagctgttagtggcaagagtcacagaatttggggaccgagcatccttatcctaaagggtccatttgggcaaca

SEQ ID NO: 79068 - DNA, 110 bp, synthetic construct
  source 1..110: mol_type = other DNA
tctgcctgcagtccatttcaaacatgtgctcacgctgacctagctggctcatagtgacctcggaacattagacgcccatctgagagcaagcaagcaggaggctgcgactg

SEQ ID NO: 79069 - DNA, 110 bp, synthetic construct
  source 1..110: mol_type = other DNA
gaccacccttcctcccacacctcttgtagacatgagctttctgatcctgtgtcttcaaacatccacagaagcctggccactgcgctctagctgaacaagggtcattttca

SEQ ID NO: 79070 - DNA, 110 bp, synthetic construct
  source 1..110: mol_type = other DNA
caaacatccacagaagcctggccactgcgctctagctgaacaagggtcattttcagtttgcggtcacctcactaaaggtcggcctagtgtctaatggcacgactttaaaa

SEQ ID NO: 79071 - DNA, 110 bp, synthetic construct
  source 1..110: mol_type = other DNA
tcacactgttcctggcacacggtgcacatcgcacaaatgttcattaggttaccgaatgctccctggagtccagggcttgcgcgtgacacctagtgtctgtggaggccttg

SEQ ID NO: 79072 - DNA, 110 bp, synthetic construct
  source 1..110: mol_type = other DNA
atgctccctggagtccagggcttgcgcgtgacacctagtgtctgtggaggccttgggctccatcatctcatctgccaccatcactctgtattctttcctgtgcttgtccc

SEQ ID NO: 79073 - DNA, 110 bp, synthetic construct
  source 1..110: mol_type = other DNA
actagcgcctcccgcctgatttccagcacagatactgaatcaatcaccagttattgttgattccgcttccaacatgaatcttgagctatcgtacgtgtgccacttacctg

SEQ ID NO: 79074 - DNA, 110 bp, synthetic construct
  source 1..110: mol_type = other DNA
tctgcccgccgcccccagcctggggccggaacagcctcccagtcctgggcagacgtcctcgggttgtctccctagcaccccgtacacactgacagagacagcaataccca

SEQ ID NO: 79075 - DNA, 110 bp, synthetic construct
  source 1..110: mol_type = other DNA
tcatctggtcctgattcctcgctccccttcccgaggatgagcccagcgaggaggccccgatggatttggggctgaaggagcccgaggagagggtgttgcccttcccagct

SEQ ID NO: 79076 - DNA, 110 bp, synthetic construct
  source 1..110: mol_type = other DNA
cccgatggatttggggctgaaggagcccgaggagagggtgttgcccttcccagctcagagcctcaggtgagtgtgagggcacgactctgggctgccctcgggagggaggg

SEQ ID NO: 79077 - DNA, 110 bp, synthetic construct
  source 1..110: mol_type = other DNA
gctgccgcggtgaaagcactgagtcctaaccactaggccaccagggagctcctgacatccccctttctgctggtagcactgcaggtgggtgagatgcatctctggggtta

SEQ ID NO: 79078 - DNA, 110 bp, synthetic construct
  source 1..110: mol_type = other DNA
catccccctttctgctggtagcactgcaggtgggtgagatgcatctctggggttattagctgagtgcgtgtggcacagagtccctgtggcagcttccgactgcccgtgtc

SEQ ID NO: 79079 - DNA, 110 bp, synthetic construct
  source 1..110: mol_type = other DNA
gtattgaaaatacactttcttggtctcaaaaccgtgctccatttaatgcaggcgtgctgatgtggatcctgcttgtttagctatgttctgagatgaacattttgacaaca

SEQ ID NO: 79080 - DNA, 110 bp, synthetic construct
  source 1..110: mol_type = other DNA
aaactccagactccagggatgggaggtgaggtggcaatcttcgctgatcaacaaggggctgaacacaggccactgaagccagaagagcaaaagcgtccatcgaaggcatt

SEQ ID NO: 79081 - DNA, 110 bp, synthetic construct
  source 1..110: mol_type = other DNA
gggctgaacacaggccactgaagccagaagagcaaaagcgtccatcgaaggcattgcagcctgagcgcctcttcaaagctccctcggaaaaggtgagtaaaacaatgaat

SEQ ID NO: 79082 - DNA, 110 bp, synthetic construct
  source 1..110: mol_type = other DNA
agtgcatagaccacggggttgagggcaggaggaatgacattgtggagcacattgagtaggactgggatgaggggaaccgtcattgctgcactgtgggtgacggaaatgac

SEQ ID NO: 79083 - DNA, 110 bp, synthetic construct
  source 1..110: mol_type = other DNA
gtaggactgggatgaggggaaccgtcattgctgcactgtgggtgacggaaatgacaacgatgactgtgtagaagaacaggattaggatgaggtgggacgtgcaggtgctt

SEQ ID NO: 79084 - DNA, 110 bp, synthetic construct
  source 1..110: mol_type = other DNA
caccgtttgatgagctggaaatcgtgcatacagtcatgtgatgagtgcatcagggatgatacggggcgttttcatctcccgaggagctggttcctgtctgtagccagtct

SEQ ID NO: 79085 - DNA, 110 bp, synthetic construct
  source 1..110: mol_type = other DNA
atgatacggggcgttttcatctcccgaggagctggttcctgtctgtagccagtctcttcctcctccctgttcacctctgaaatctccgatgagctgtcactgacgttgtc

SEQ ID NO: 79086 - DNA, 110 bp, synthetic construct
  source 1..110: mol_type = other DNA
caggaagcatgtcgtgttttctctgtcaagagtctagtttgcacaatagaaggttcaccgtgggaagaggtgcggcaaggtgttttcatagcatctggatggacatcctg

SEQ ID NO: 79087 - DNA, 110 bp, synthetic construct
  source 1..110: mol_type = other DNA
caccgtgggaagaggtgcggcaaggtgttttcatagcatctggatggacatcctgcggtgaatgcttcgacaacgtacagaggctctttttaacttctctatctgtacgt

SEQ ID NO: 79088 - DNA, 110 bp, synthetic construct
  source 1..110: mol_type = other DNA
acttttatgcttaatattttataaacccccaatctgaccctttaacctattctgtgccacactttgtacatagttttagccaacatgtattgagcatttaaatcgttcca

SEQ ID NO: 79089 - DNA, 110 bp, synthetic construct
  source 1..110: mol_type = other DNA
cctattctgtgccacactttgtacatagttttagccaacatgtattgagcatttaaatcgttccacttactaagactaatttattactagatgatgaatctttcagtatt

SEQ ID NO: 79090 - DNA, 110 bp, synthetic construct
  source 1..110: mol_type = other DNA
cattacccctcaaaagcacttttcatattttcactaacaaacacttagaagagtagatttaaagggttaccattgaaaatatacaaaaaaccaaacatgtgcgactaaat

SEQ ID NO: 79091 - DNA, 110 bp, synthetic construct
  source 1..110: mol_type = other DNA
aaaggatgtggtacaacaaaacagccagggaaatcctgtttggtttggtacaatacagccagggaaagctgctggggtgagtagccacggctcagactcagacccttctc

SEQ ID NO: 79092 - DNA, 110 bp, synthetic construct
  source 1..110: mol_type = other DNA
agggtggggtctctctgcaagttggggaagagacatggggtcgcgggatttagtctctctattctgtcaaggactgtttctgctttcctgtttctgccacctttgaaaaa

SEQ ID NO: 79093 - DNA, 110 bp, synthetic construct
  source 1..110: mol_type = other DNA
atagtatctaaatttggcaacaagtttatatgtgttcttttccttaagaagaaagtatctttaggggatataggcttcagaactagtctttaagctacctgcttattgct

SEQ ID NO: 79094 - DNA, 110 bp, synthetic construct
  source 1..110: mol_type = other DNA
tatctttaggggatataggcttcagaactagtctttaagctacctgcttattgcttctccccaagagaaggggccacagataaatggttctatgacaaatgaatgggaac

SEQ ID NO: 79095 - DNA, 110 bp, synthetic construct
  source 1..110: mol_type = other DNA
gattgcgacactctgttaccacctgtgctacctcccagcggttcagcactaaacagcatcagctcagaataatgattttttccattatagctggtttacagtgttctgtc

SEQ ID NO: 79096 - DNA, 110 bp, synthetic construct
  source 1..110: mol_type = other DNA
tgctcagtctactctcaacacattaatatgaaccaacgtttaccgacattttttcttcacgaagaagcttacattgaagttacacccacttgcggcttctccaggagtgt

SEQ ID NO: 79097 - DNA, 110 bp, synthetic construct
  source 1..110: mol_type = other DNA
atatgaaccaacgtttaccgacattttttcttcacgaagaagcttacattgaagttacacccacttgcggcttctccaggagtgtcaatggcagagtggtgaagaacaat

SEQ ID NO: 79098 - DNA, 110 bp, synthetic construct
  source 1..110: mol_type = other DNA
gcctataaataaaggtcatttattgagaaataactcgacattctcagctgtgtttattatcaccaggttttcttttcaaaacgctgatccagattttaaccaagcatata

SEQ ID NO: 79099 - DNA, 110 bp, synthetic construct
  source 1..110: mol_type = other DNA
attatcaccaggttttcttttcaaaacgctgatccagattttaaccaagcatatacaagctttagaacttcctaacaatactgagcaatgagacacctctccaaggcggc

SEQ ID NO: 79100 - DNA, 110 bp, synthetic construct
  source 1..110: mol_type = other DNA
ggcacaaacacacagacacaagctgcttcctaacccgtgtatgtgttacactcgaagggcacccagctcccctggtcctacattccagatgctggctctgggaacttggc

SEQ ID NO: 79101 - DNA, 110 bp, synthetic construct
  source 1..110: mol_type = other DNA
cttgggtgatttacagaaacttgcctggaggaggtggcagtggtgctggagctgctgggtcggggggcaggggggtgaaggatggaaatgggggagaaatgctggattcc

SEQ ID NO: 79102 - DNA, 110 bp, synthetic construct
  source 1..110: mol_type = other DNA
gggacggtagtgttggggttagcatgggtcagcagacaaggaggcccggtttcggggcctcggagcagctgcaggtgaactacgcgcgacagacctcctaggagagccct

SEQ ID NO: 79103 - DNA, 110 bp, synthetic construct
  source 1..110: mol_type = other DNA
acaaaaaacaagccacggcatgaaaagaaaaagtaacatgatggcggcggattatacgtatgcaggtgagctcccaaggacacgaactgtgccttaaatcattcgtcttt

SEQ ID NO: 79104 - DNA, 110 bp, synthetic construct
  source 1..110: mol_type = other DNA
acgtatgcaggtgagctcccaaggacacgaactgtgccttaaatcattcgtctttctatccctagagcctagcacaaagtaaagataaacaacgaatattcaactgaaaa

SEQ ID NO: 79105 - DNA, 110 bp, synthetic construct; identical to SEQ ID NO: 79103
  source 1..110: mol_type = other DNA

SEQ ID NO: 79106 - DNA, 110 bp, synthetic construct; identical to SEQ ID NO: 79104
  source 1..110: mol_type = other DNA

SEQ ID NO: 79107 - DNA, 110 bp, synthetic construct
  source 1..110: mol_type = other DNA
agtctgtctcccgtgcgttgccctgcactctgggtatgagtctcttctgagccccagaagcaggggctgcgtccatggcctcattcccagtccctgcctggctgtgctcc

SEQ ID NO: 79108 - DNA, 110 bp, synthetic construct
  source 1..110: mol_type = other DNA
agaagcaggggctgcgtccatggcctcattcccagtccctgcctggctgtgctccaagctctgcccctcacccaaggtcctcacaggggaccaagatctccagcctgaag

SEQ ID NO: 79109 - DNA, 110 bp, synthetic construct; identical to SEQ ID NO: 79107
  source 1..110: mol_type = other DNA

SEQ ID NO: 79110 - DNA, 110 bp, synthetic construct; identical to SEQ ID NO: 79108
  source 1..110: mol_type = other DNA

SEQ ID NO: 79111 - DNA, 110 bp, synthetic construct
  source 1..110: mol_type = other DNA
ctgaaaacgtgtcacagcaggttcacggttgtgtgcactctcttgtgtgaagcgggctcaaaactatgactgtggacacagacggtaaaccgcccttcaggtgaatccat

SEQ ID NO: 79112 - DNA, 110 bp, synthetic construct
  source 1..110: mol_type = other DNA
ggggcctggcagcagaattcactgtcttcctgaagtgggaaggcggagagaggtgggcacccatttaaaaatacccacagcagcctggcactttaggcaggggtgggggc

SEQ ID NO: 79113 - DNA, 110 bp, synthetic construct
  source 1..110: mol_type = other DNA
ttcagaatcagcagacctgggttcaaatgtctgttcttattttgttttgtggcctcttacttcaactatagttttctcatctgtgaaacggtaataagctacaccatgta

SEQ ID NO: 79114 - DNA, 110 bp, synthetic construct
  source 1..110: mol_type = other DNA
cttacttcaactatagttttctcatctgtgaaacggtaataagctacaccatgtacaagtgcttcaagattcaccatgacatataaaagggcccagggcagggctgggcc

SEQ ID NO: 79115 - DNA, 110 bp, synthetic construct
  source 1..110: mol_type = other DNA
ttaatctctttgctcatcaatagtctacaactttaaatttgatttctgataacgtatcagggattgtcaagctgtggtacctccatggcctgtttctgtgtggcctgtga

SEQ ID NO: 79116 - DNA, 110 bp, synthetic construct
  source 1..110: mol_type = other DNA
ttaagctcagttaaagatgtaaggtgcaagggggtaagaagaggaagcctggagagagggggatcctaccccctctccaggtctgtttctcataagtaaaatgagaatag

SEQ ID NO: 79117 - DNA, 110 bp, synthetic construct
  source 1..110: mol_type = other DNA
ggtaaatccgtatatattaagttggagctcctttaaaaaggtctcctctgatcgctccctgtgaatgacatcagggaaacttgaaaattgtctttggctcttccttctca

SEQ ID NO: 79118 - DNA, 110 bp, synthetic construct
  source 1..110: mol_type = other DNA
cccttctttctggctctaggaaggatgtcatctggaccatgcagacgaaagggaatccatgggacatactctcctagtcagcggtccagaatgtctgagtttgaatacca

SEQ ID NO: 79119 - DNA, 110 bp, synthetic construct
  source 1..110: mol_type = other DNA
tccatgggacatactctcctagtcagcggtccagaatgtctgagtttgaataccagcttgaccacgcacttgctgtgtgaccttgggcatgtcgctgtccctctctgaac

SEQ ID NO: 79120 - DNA, 110 bp, synthetic construct
  source 1..110: mol_type = other DNA
ctttttgccaaagtgtagtctttcttaccagaaggtgagctcccagagggcagagccctggagcttcccaccccagcccagggttggtgcgccctaccttgtgctgaatg

SEQ ID NO: 79121 - DNA, 110 bp, synthetic construct
  source 1..110: mol_type = other DNA
gagaacaatttggtgagacagttatagtcataccaaagattttaaagctgaacatgaaaaatggctcgtcatcccacaacctggagataatccctgtaaacgtccgtcta

SEQ ID NO: 79122 - DNA, 110 bp, synthetic construct
  source 1..110: mol_type = other DNA
cctgtgtcccacatgctccttcacgtctgtctttatggagtgtgtgcagccttcaagctccgctcctcagcttggggcctggtgctgccattcctcaaaccagagcctca

SEQ ID NO: 79123 - DNA, 110 bp, synthetic construct
  source 1..110: mol_type = other DNA
agctccgctcctcagcttggggcctggtgctgccattcctcaaaccagagcctcagggaaaggccactcaacatcatgtcaggtaacagtcaagacagctacctgggcgc

SEQ ID NO: 79124 - DNA, 110 bp, synthetic construct
  source 1..110: mol_type = other DNA
atcactgcataatcaatgtaatcacatttctttacaaccagctctcagagagaaatgatgggctctttcattctatcccttttccctttgaaaattaagtgtggacagag

SEQ ID NO: 79125 - DNA, 110 bp, synthetic construct
  source 1..110: mol_type = other DNA
ctgcagagcctagtctgggcacagaggtggagctccagccaggcctgcatgaagcccctgggctgaggagggagccggggccttttaatgattttcagagtcaaaagtac

SEQ ID NO: 79126 - DNA, 110 bp, synthetic construct
  source 1..110: mol_type = other DNA
tctacccacagcagatagtgcccagcatgtgtgagaatggaaggtgctggtgtgtagcggcttctgcaaaaagcagaggtgtgggcccacgtgttagtgatggcaagatg

SEQ ID NO: 79127 - DNA, 110 bp, synthetic construct
  source 1..110: mol_type = other DNA
ttcagcttatcaaggttgatcttttgtcacctgggtttcggatgcccaagcaaaacgtgcatcccatgagcctgcggggcccttgccagctggcagctgccttcccctcg

SEQ ID NO: 79128 - DNA, 110 bp, synthetic construct
  source 1..110: mol_type = other DNA
gaagagataaacaagaaggccctactgtacagcacagggaactgtattcaatacctgagataagtcatgacggaaaagcatatacagaagaatgtgtatatttaactaca

SEQ ID NO: 79129 - DNA, 110 bp, synthetic construct
  source 1..110: mol_type = other DNA
tgtacagcacagggaactgtattcaatacctgagataagtcatgacggaaaagcatatacagaagaatgtgtatatttaactacagatgcgataaaaaaataaataaaat

SEQ ID NO: 79130 - DNA, 110 bp, synthetic construct
  source 1..110: mol_type = other DNA
tattcttcccatcgaaagaggctttaaacacccaggcttcccatcggcaaggcggagagcgctggcgtgagccgggccgggaagttcggcatcacgtgaacagacaaggt

SEQ ID NO: 79131 - DNA, 110 bp, synthetic construct
  source 1..110: mol_type = other DNA
taatttgcgaaggagagcttaacatgtgggcactccgagtagtgtgccccggtgtgcgcagtggtgatgatttgtttattgcttgatcgattgtctcaacagtctggcac

SEQ ID NO: 79132 - DNA, 110 bp, synthetic construct
  source 1..110: mol_type = other DNA
gcgcagtggtgatgatttgtttattgcttgatcgattgtctcaacagtctggcacggccagctaggttaggcgattatgttcctcaggtttttctttggcagtcatgaga

SEQ ID NO: 79133 - DNA, 110 bp, synthetic construct
  source 1..110: mol_type = other DNA
accacctactgtcttagttcacaagagggggcctgagtttcccactggtctcagccggcagagacctggcgggcttgcacccccgaggagggatgagggcctggatgggg

SEQ ID NO: 79134 - DNA, 110 bp, synthetic construct
  source 1..110: mol_type = other DNA
agtggcacatcatgctggcaatttcccccaatggtcgccctcttggcctttgcatcgtcggttccatctgtccacatgtgcttcctctcccagaacgctgcttaaatatc

SEQ ID NO: 79135 - DNA, 110 bp, synthetic construct
  source 1..110: mol_type = other DNA
cgtcggttccatctgtccacatgtgcttcctctcccagaacgctgcttaaatatccctaggaagccttccctgacccttgggtcgagggcagtgtcctccgcagatttcc

SEQ ID NO: 79136 - DNA, 110 bp, synthetic construct
  source 1..110: mol_type = other DNA
agaaagaagaaaaaccactcactcacatgttagtttccatctcttcttgcccctgcccgccagcgactgtgggcacagttttagggggcagctttgatcgctgacacgat

SEQ ID NO: 79137 - DNA, 110 bp, synthetic construct
  source 1..110: mol_type = other DNA
cccgccagcgactgtgggcacagttttagggggcagctttgatcgctgacacgatgacatattcttacaactcagccttgtatcagaaagctttttccattttgccacat

SEQ ID NO: 79138 - DNA, 110 bp, synthetic construct; identical to SEQ ID NO: 79136
  source 1..110: mol_type = other DNA

SEQ ID NO: 79139 - DNA, 110 bp, synthetic construct; identical to SEQ ID NO: 79137
  source 1..110: mol_type = other DNA

SEQ ID NO: 79140 - DNA, 110 bp, synthetic construct
  source 1..110: mol_type = other DNA
gaggtgagccgttcatgcagacagaacattctagaacttttacttatatttttacatttaaaaagggaagaaacatttaagatctagtaatattaaacaagtagactgac

SEQ ID NO: 79141 - DNA, 110 bp, synthetic construct
  source 1..110: mol_type = other DNA
tatccaccccccacaaaaatgtcacacgggcagacacgctgtccacaagcatttcaaacattttgcagagacaccgtcaaaagtcacacagccgccacacacagacaccc

SEQ ID NO: 79142 - DNA, 110 bp, synthetic construct
  source 1..110: mol_type = other DNA
aaacattttgcagagacaccgtcaaaagtcacacagccgccacacacagacacccccccccgccaagctcaactctcatatctacgcttcacaagcacactgaacataca

SEQ ID NO: 79143 - DNA, 110 bp, synthetic construct
  source 1..110: mol_type = other DNA
tagacaagcgaaaaagccaagttcctccccccaaagaaaaatcaggtgagggggcctgtcctaccagctattgtaacatatcataaaaccatagaaattaaggaagtgtg

SEQ ID NO: 79144 - DNA, 110 bp, synthetic construct
  source 1..110: mol_type = other DNA
cagcatgcgtttcagggacaaaaccaaaatgggttgtggcttgaggtcagaaaactgaagggctttggaaactgacctggattcaaggcccggccccactactgacttgc

SEQ ID NO: 79145 - DNA, 110 bp, synthetic construct
  source 1..110: mol_type = other DNA
tgaagggctttggaaactgacctggattcaaggcccggccccactactgacttgctgggaggtgttgcagagtcacgtgatctcgcccctcctcaatttcatcagctttg

SEQ ID NO: 79146 - DNA, 110 bp, synthetic construct; identical to SEQ ID NO: 79144
  source 1..110: mol_type = other DNA

SEQ ID NO: 79147 - DNA, 110 bp, synthetic construct; identical to SEQ ID NO: 79145
  source 1..110: mol_type = other DNA

SEQ ID NO: 79148 - DNA, 110 bp, synthetic construct
  source 1..110: mol_type = other DNA
caagtcaaccagcctttatgtaccaggcatcacgctcttgctgaggatacaaggatgaaaactgagctctactcggagcaataaaactataaaatgttctaagatctgga

SEQ ID NO: 79149 - DNA, 110 bp, synthetic construct
  source 1..110: mol_type = other DNA
ctccacagctaagggcatatgggaggaggcctgggctgaccagagaaacaaggcatcactgctggggagtgtgtgtggtagggggcaggacaaccataggaacatctctg

SEQ ID NO: 79150 - DNA, 110 bp, synthetic construct
  source 1..110: mol_type = other DNA
ttttcttgtgcttatatgacaaccatatatcctcctgagtaaagcactggttcgtttctttcacctgttttctgatgagcttgtttgcttctttactgttcagttgagag

SEQ ID NO: 79151 - DNA, 110 bp, synthetic construct
  source 1..110: mol_type = other DNA
gatttcagcaaacaaggaaaagtatcaaaaccatgcctgagtctataaacagcaagaggctgtggctgaagatgctccaggccagggcagaacaaaacaagggagcctat

SEQ ID NO: 79152 - DNA, 110 bp, synthetic construct
  source 1..110: mol_type = other DNA
gaggctgtggctgaagatgctccaggccagggcagaacaaaacaagggagcctatgctggaaatgcgctgcgtgcccacagatggtgggacaatgatgcctgcttcctgg

SEQ ID NO: 79153 - DNA, 110 bp, synthetic construct
  source 1..110: mol_type = other DNA
gtccacattctgggcacttgaggttgcccattgcccttggggttttaatacttctagtcctttgtgaaaagtacagaaataggagaaagaatcataagcatatattgcta

SEQ ID NO: 79154 - DNA, 110 bp, synthetic construct
  source 1..110: mol_type = other DNA
acttgaggttgcccattgcccttggggttttaatacttctagtcctttgtgaaaagtacagaaataggagaaagaatcataagcatatattgctatttttatttttattt

SEQ ID NO: 79155 - DNA, 110 bp, synthetic construct
  source 1..110: mol_type = other DNA
aaaacagtatcttcagatactcccttcaagttcaaatttcccaggattttctatctataaatgaaatcattgtttgaaattacataactgtttccctcttcctcactcta

SEQ ID NO: 79156 - DNA, 110 bp, synthetic construct
  source 1..110: mol_type = other DNA
gtctgatgcctgcactttccctcacagctctcaaaagcatgtaaggttcctgtatgcctagagaacaaactgccatgatctacctaaatctttgttgccttatcacccta

SEQ ID NO: 79157 - DNA, 110 bp, synthetic construct
  source 1..110: mol_type = other DNA
agaaggtggagaaggaggccgacagtctgggcccggggaccctcaggaatgccgccgtgccctctgcagagggctcccgctctgtgctggacctggtcaactacttcctg

SEQ ID NO: 79158 - DNA, 110 bp, synthetic construct
  source 1..110: mol_type = other DNA
cgtgccctctgcagagggctcccgctctgtgctggacctggtcaactacttcctgtcgccggagaagctgacggccgagaaccgctaccactgcgagtcgtgcgcctccc

SEQ ID NO: 79159 - DNA, 110 bp, synthetic construct
  source 1..110: mol_type = other DNA
gtgcagtttatcttcctccctctccattcccttcttcccctcactttacatcataaatggtctttttccccttcttttatgcctgtggcttacctaggttaccaagggcc

SEQ ID NO: 79160 - DNA, 110 bp, synthetic construct
  source 1..110: mol_type = other DNA
taaaaacgggttctctgcgattgctttctggtcatgatatagaccttggtttctagcagtaaggtgatctaaatattctggatgtccctcccaaagaaaaagatttaaaa

SEQ ID NO: 79161 - DNA, 110 bp, synthetic construct
  source 1..110: mol_type = other DNA
tccagatacagtttgagaaattcaaggctctgcttctgcataaaatgtctttctagtctcacagacatgggggatgtttttgttgcaaaacgtttcatacggaaaagcat

SEQ ID NO: 79162 - DNA, 110 bp, synthetic construct
  source 1..110: mol_type = other DNA
gatactacgcccagtgggagacattttggaaataaacttccttaaaaagaaaggtttgagcaagtgctccccagtttctccgttgtaacttgtgctatttgtttgggggc

SEQ ID NO: 79163 - DNA, 110 bp, synthetic construct
  source 1..110: mol_type = other DNA
ttgagcaagtgctccccagtttctccgttgtaacttgtgctatttgtttgggggcagctaggctcttgagataattctgctgacaatggtgggggtggcgacatcactgt

SEQ ID NO: 79164 - DNA, 110 bp, synthetic construct
  source 1..110: mol_type = other DNA
tctctgatttaagagaaggacaaaataagctgggaggtatgttgaaaaagtgccgacattcagcatctagtctttaagcagatcaatgtttaaacaattcactaaagact

SEQ ID NO: 79165 - DNA, 110 bp, synthetic construct
  source 1..110: mol_type = other DNA
attattctggttttccatctaaggagaccaaagctcaacgcggctgtaactaatgggcccaccgtcgtgcaagtagcaggtattcaagccaacatgtgaagccaggtctg

SEQ ID NO: 79166 - DNA, 110 bp, synthetic construct
  source 1..110: mol_type = other DNA
atacgaatgaatagtggatgccttttatctgcctgttggtgacggagttctctgcacatgtgggtttagataccatcaagctgatgctcgtgcaaaaactttcaaggcct

SEQ ID NO: 79167 - DNA, 110 bp, synthetic construct
  source 1..110: mol_type = other DNA
gcctcacctctctgggcctcaatttccttttctccggagtggaatagtatcagcctcctgaggctgttggaggagtacaggaaaccttacattccccagagcagagaggt

SEQ ID NO: 79168 - DNA, 110 bp, synthetic construct
  source 1..110: mol_type = other DNA
tcctgaggctgttggaggagtacaggaaaccttacattccccagagcagagaggtagcagctacccacagtgtttattatcttgcatcttcatttatttctttacacaat

SEQ ID NO: 79169 - DNA, 110 bp, synthetic construct; identical to SEQ ID NO: 79167
  source 1..110: mol_type = other DNA

SEQ ID NO: 79170 - DNA, 110 bp, synthetic construct; identical to SEQ ID NO: 79168
  source 1..110: mol_type = other DNA

SEQ ID NO: 79171 - DNA, 110 bp, synthetic construct
  source 1..110: mol_type = other DNA
tgggttgctgcagtgctcacatgcctatcacctagcaaaggcttaacagattgttggtgactattatcaggcaaaggcttaacaaattgttggtgactactgcagttttg

SEQ ID NO: 79172 - DNA, 110 bp, synthetic construct
  source 1..110: mol_type = other DNA
ctccataggaagtcaccccggaccccacgcccctggcacaggagctggaacaacgccctctgcaccaaatgcccatattctgatgcccagaactcatgaacacgtgacct

SEQ ID NO: 79173 - DNA, 110 bp, synthetic construct
  source 1..110: mol_type = other DNA
atgttagcagtctttgatgttccttgactagatccatccttttattagaggttgtaaacgcatcatattctagttctgccattccttcttcactttttactggaatgcct

SEQ ID NO: 79174 - DNA, 110 bp, synthetic construct
  source 1..110: mol_type = other DNA
ggatcaggaagactagggaggcaagggttggagaagagacttacaccgaatgcctctgtagtagaatcaattcatgttggaggtgaccattacaatgcagtattatcaat

SEQ ID NO: 79175 - DNA, 110 bp, synthetic construct
  source 1..110: mol_type = other DNA
ctgtagtagaatcaattcatgttggaggtgaccattacaatgcagtattatcaatggaatagacgggtaatggggacctactgtacagcagggggaaattactcagtact

SEQ ID NO: 79176 - DNA, 110 bp, synthetic construct
  source 1..110: mol_type = other DNA
aggaaaacagatcagttcatccattcattcattcagtaaatatttactgatgacctactaggtagtcaatgctagggaccaaatctctccatcatgaagcttttaaggga

SEQ ID NO: 79177 - DNA, 110 bp, synthetic construct
  source 1..110: mol_type = other DNA
tactaggtagtcaatgctagggaccaaatctctccatcatgaagcttttaagggagggaatggagtatctcagggggagataaatgccactgaagggaggggagcaccag

SEQ ID NO: 79178 - DNA, 110 bp, synthetic construct
  source 1..110: mol_type = other DNA
taatttgcttccaaaataatggtgtgcagtttggaagtgacacaagccaacttgcaatataatagcagttggaaattaatgttcatctctcagccttttattaagttggc

SEQ ID NO: 79179 - DNA, 110 bp, synthetic construct
  source 1..110: mol_type = other DNA
cctacgtccatcctgctctgtttcactcctccctgccactaacccaagtgattgatggaactcagtttgaaatgtcactggcctgtagaataaaattcagactcctctct

SEQ ID NO: 79180 - DNA, 110 bp, synthetic construct
  source 1..110: mol_type = other DNA
cacattccatgggaatcatttccacttcctggtgtacctgtggataagtcaaaagtggaagcaccatcacataatgtttcttatacacagatacacaaagaggaagcaga

SEQ ID NO: 79181 - DNA, 110 bp, synthetic construct
  source 1..110: mol_type = other DNA
tggaagcaccatcacataatgtttcttatacacagatacacaaagaggaagcagaactaataaacttaacttatcctgaatttgagaacaggacatatagattccttttc

SEQ ID NO: 79182 - DNA, 110 bp, synthetic construct
  source 1..110: mol_type = other DNA
cagtagacagatacctgatgtatgtgaataaatgaatgtagaaagaaaatgtatgctagccaggaacaaaaaggaataggaacagataatgtctaacatttcatagagtg

SEQ ID NO: 79183 - DNA, 110 bp, synthetic construct
  source 1..110: mol_type = other DNA
cccgacttagaacctattttccagggcaggtatgccagcaagaataaacaccatgaatttggactggcccttcgtctccaagctgcaggacctcccagtgcctcctatgc

SEQ ID NO: 79184 - DNA, 110 bp, synthetic construct
  source 1..110: mol_type = other DNA
tgatcccatcaggcagatagcctgcaagatctcagtggaggtcttccagctccgtgattccctcagcacattgactcaaagccaaagactgaaggttaccgcaggtaagt

SEQ ID NO: 79185 - DNA, 110 bp, synthetic construct
  source 1..110: mol_type = other DNA
cattgtgagcatcctgcctcaacacatgagaaatatgaaaacactctcatttgagtgaactagttgcagctgcaaacgtgacggcaggaacaaggtactatatatgccca

SEQ ID NO: 79186 - DNA, 110 bp, synthetic construct
  source 1..110: mol_type = other DNA
tgaactagttgcagctgcaaacgtgacggcaggaacaaggtactatatatgcccaatgttgattagcatcaccacaactcattattctgatcagccagaagcaatttaca

SEQ ID NO: 79187 - DNA, 110 bp, synthetic construct
  source 1..110: mol_type = other DNA
gccaccctgaggacacggttagtgaatgtcagtgcaagaattctaactcaggaggatctatttctagggcctctgttcacctcactaggctacactgagttactgagctc

SEQ ID NO: 79188 - DNA, 110 bp, synthetic construct
  source 1..110: mol_type = other DNA
atctatttctagggcctctgttcacctcactaggctacactgagttactgagctcagtgaaacaaagaagtgacggatgacttacgtcacatgttacctgaatattgtca

SEQ ID NO: 79189 - DNA, 110 bp, synthetic construct
  source 1..110: mol_type = other DNA
gcctgctgagccacagtggaaactcccaggattcttagatattttaaagaaatttattgtccaatgtcttattacctatacgaggctattcctctttgcaattttatttc

SEQ ID NO: 79190 - DNA, 110 bp, synthetic construct
  source 1..110: mol_type = other DNA
aagcctaacacagaggtatgtgtattaagaaaaaaaaaattgttgccaagttgtttgtttaaacagcaaagtgcaacagttactgataatagactgagcaatgattaggt

SEQ ID NO: 79191 - DNA, 110 bp, synthetic construct
  source 1..110: mol_type = other DNA
tgtttaaacagcaaagtgcaacagttactgataatagactgagcaatgattaggtaaccagaaattcacaagaaagggactgtctagatgtagtaactgttcatctgaat

SEQ ID NO: 79192 - DNA, 110 bp, synthetic construct
  source 1..110: mol_type = other DNA
tgtctctggtgggtggcattttatttaatgaagctgaaaatgtaaattcattgcgggtaccaaggggtggcacattcttgggaagagcatttctcaagtagaaaggtcac

SEQ ID NO: 79193 - DNA, 110 bp, synthetic construct
  source 1..110: mol_type = other DNA
tttgtttatttatttttttattgaaaagcttataggcaagttcctaagtgggtggacaggtgaaaaagcagacaagtcactaggctggcaacatgataggaaaagaacca

SEQ ID NO: 79194 - DNA, 110 bp, synthetic construct
  source 1..110: mol_type = other DNA
gagccacttccctctgaagctgcacctatgcaagtcatctgatagtcagttattggtgctctcctgtatattagtgttgatagttattattttttaccatgtattattgt

SEQ ID NO: 79195 - DNA, 110 bp, synthetic construct
  source 1..110: mol_type = other DNA
gtgctctcctgtatattagtgttgatagttattattttttaccatgtattattgtgatttttatgtgtacaaatgagtaagtttgcatgtgtgtgcatgttggattgtgg

SEQ ID NO: 79196 - DNA, 110 bp, synthetic construct
  source 1..110: mol_type = other DNA
aggtaatgaaccacatagatggagaccctgagccatagatgagagtgagctattcacagatttttattatatgagaaacagtccactatttaagcactgtattctgttgc

SEQ ID NO: 79197 - DNA, 110 bp, synthetic construct
  source 1..110: mol_type = other DNA
atggacaatatgttgtaagactggaaggtttgacctgaagagtattgttgggtttgtgtgtgtgtgttttagcatctcaattaacttggctggactcaaattgcaaacta

SEQ ID NO: 79198 - DNA, 110 bp, synthetic construct
  source 1..110: mol_type = other DNA
gtgtgtgtgtgttttagcatctcaattaacttggctggactcaaattgcaaactatgttctcttttctttgtaggcaattgttcttttttaacattacctagagttcttg

SEQ ID NO: 79199 - DNA, 110 bp, synthetic construct
  source 1..110: mol_type = other DNA
tgagaagtgtgacctgcaccaggcaggtcagtggcccacaaaggtttagatatggtggtggcctatgtgggatttaagcctatggaccaccaagtgcattcactcttatc

SEQ ID NO: 79200 - DNA, 110 bp, synthetic construct
  source 1..110: mol_type = other DNA
tggtggcctatgtgggatttaagcctatggaccaccaagtgcattcactcttatcactctatgccagttgctgtcatctgcccaagggctttttaccttagctgttgaag

SEQ ID NO: 79201 - DNA, 110 bp, synthetic construct
  source 1..110: mol_type = other DNA
gcacacaccgattccaggtcacacaagcacagctcctcactctgccctccaagcccaggttcctttttaggagctaaacccaatcttttccctgccaaccacacccacaa

SEQ ID NO: 79202 - DNA, 110 bp, synthetic construct
  source 1..110: mol_type = other DNA
caggttcctttttaggagctaaacccaatcttttccctgccaaccacacccacaaataagtaaccatttgtccctataaccaagtagcacaggggatataaacaggaaca

SEQ ID NO: 79203 - DNA, 110 bp, synthetic construct
  source 1..110: mol_type = other DNA
tccaagaagtgtttgcagaaggcctagacagtgatttctctaaatccagatatattatagcttgttctgggtttggcagtaaaaaccacagggccaggcctgagcatggc

SEQ ID NO: 79204 - DNA, 110 bp, synthetic construct
  source 1..110: mol_type = other DNA
gaaatagctgatctggaagaacgtgcaaagagccagttttttgaaaaggtgcatgaagaagttgtgctcaaaactcaggaggctgctaaagaaaaggagttccaaagtgt

SEQ ID NO: 79205 - DNA, 110 bp, synthetic construct
  source 1..110: mol_type = other DNA
ctccaaaaatggaagatgttaagtacttgaggaagcataattagagaaagtcacaacgtgataacctgagaaccacagaaacgcatcaggagatcctttgaggccagatt

SEQ ID NO: 79206 - DNA, 110 bp, synthetic construct
  source 1..110: mol_type = other DNA
acgtgataacctgagaaccacagaaacgcatcaggagatcctttgaggccagattaaaggaatatcgcatctacccaccccacagggcgcctctccacctggtccttatc

SEQ ID NO: 79207 - DNA, 110 bp, synthetic construct
  source 1..110: mol_type = other DNA
gtaaaatttttggaaagagttaaaaatcgttaaggagaaaatttgacagaaattcatttacagtcataaacacacaccccacacccccacacccccacaccacaggagat

SEQ ID NO: 79208 - DNA, 110 bp, synthetic construct; identical to SEQ ID NO: 79207
  source 1..110: mol_type = other DNA

SEQ ID NO: 79209 - DNA, 110 bp, synthetic construct
  source 1..110: mol_type = other DNA
ttaagacataaacaagaaactgcatgagtacagagaggttcctaacccagcttcaggggaagtacagaaaggatggtgttggaggggaggcagcaccaagacataatcct

SEQ ID NO: 79210 - DNA, 110 bp, synthetic construct
  source 1..110: mol_type = other DNA
agcaatcctctttatttcctgccctgtgcagccaagccaccttccaggtcacaagcaggcaaggtaaaaaatataataaaaataattttttatgagtggttcaggtcaag

SEQ ID NO: 79211 - DNA, 110 bp, synthetic construct
  source 1..110: mol_type = other DNA
tgccacatttgtgaagtacagaccacaagttctccagctgcaggcaggtacaaacaagttgcctaatggccaggaaaagtggaaaaagccacaccattcagcaaggactt

SEQ ID NO: 79212 - DNA, 110 bp, synthetic construct
  source 1..110: mol_type = other DNA
cccacaaggttctaaactcgttcttaaggtattggtgaagcataatacagctcctgtcctttaggatttcacagactaggtaaccatgtcgccaaattgatatatattgt

SEQ ID NO: 79213 - DNA, 110 bp, synthetic construct
  source 1..110: mol_type = other DNA
cactaggatatttggatggcccaggagagagagagacaaagacctgaaaaatgctcaaagtctcagaacagttcacaggaaaggattaaataaaaatgaagttacaggtg

SEQ ID NO: 79214 - DNA, 110 bp, synthetic construct
  source 1..110: mol_type = other DNA
cactgttttagttcctttcaagctgtctttatacatgcagagcttttaattcaaaaagaacaggtataacttaaagatgactcaccttcatcagaaactataccagcaga

SEQ ID NO: 79215 - DNA, 110 bp, synthetic construct
  source 1..110: mol_type = other DNA
acaaataggttcacattggaacagcaggtagaaggtggagataggaagcttactgctaactctttgaaataacactagttcttcagagaaccaaccaaccagtctctcca

SEQ ID NO: 79216 - DNA, 110 bp, synthetic construct
  source 1..110: mol_type = other DNA
acactcattccccaggtgatagacgtgttaggtgctaagttcacagctaagcctctctctccaggaagttaccttgaccaagatcatttcaccactcctaggcaacccac

SEQ ID NO: 79217 - DNA, 110 bp, synthetic construct
  source 1..110: mol_type = other DNA
ttactcagcattttatgcttggttaagaatcatctcctctgtgaagccattcctggcccctacatattcatttgaccactcacctctgttagtgctgccattctagccta

SEQ ID NO: 79218 - DNA, 110 bp, synthetic construct
  source 1..110: mol_type = other DNA
gcccctacatattcatttgaccactcacctctgttagtgctgccattctagcctatttgtacttctaacagagcatgtgaaagctttactgcactgtttattcgcctgcc

SEQ ID NO: 79219 - DNA, 110 bp, synthetic construct
  source 1..110: mol_type = other DNA
cagaaaagtcacagttgcagcctgtagaagtaaaaagtagagatctaataagcttatcacttgggagcagttctttacctctcggtcatgaggacagcagcaggtatagc

SEQ ID NO: 79220 - DNA, 110 bp, synthetic construct
  source 1..110: mol_type = other DNA
atcacttgggagcagttctttacctctcggtcatgaggacagcagcaggtatagcgagcagctgaagacagatgaagaagagagctcaagtatagcgtttggagcctctg

SEQ ID NO: 79221 - DNA, 110 bp, synthetic construct
  source 1..110: mol_type = other DNA
aggcttattttgtacccagactcatatgcattgatcaaggttaatactggccaccatcttgtatgctgggatccattggttggttttggagacatattaattagattatc

SEQ ID NO: 79222 - DNA, 110 bp, synthetic construct
  source 1..110: mol_type = other DNA
atcttgtatgctgggatccattggttggttttggagacatattaattagattatcagtgtctttgtcttcaccttactctcttttgtctttgctgtagcttagccagcat

SEQ ID NO: 79223 - DNA, 110 bp, synthetic construct
  source 1..110: mol_type = other DNA
atttttctgttctggttgcctgcctaggatcccagctcctttctaggtaatgagttaggtaaccaagacagaaggtggaaatactgactaagccattggatttatccctc

SEQ ID NO: 79224 - DNA, 110 bp, synthetic construct
  source 1..110: mol_type = other DNA
ctgtcaccagtagtgtcaccaggcactgtcggaaaattaggaacagcccatggacttgaggcacgagagctttgcaggtgacgtggatgtgtccgtcccccaaaccagga

SEQ ID NO: 79225 - DNA, 110 bp, synthetic construct
  source 1..110: mol_type = other DNA
ttgaggcacgagagctttgcaggtgacgtggatgtgtccgtcccccaaaccaggaggtcttagtgactcagacccgcaattccctccgccctcctcgttaacattgcgac

SEQ ID NO: 79226 - DNA, 110 bp, synthetic construct; identical to SEQ ID NO: 79224
  source 1..110: mol_type = other DNA

SEQ ID NO: 79227 - DNA, 110 bp, synthetic construct; identical to SEQ ID NO: 79225
  source 1..110: mol_type = other DNA

SEQ ID NO: 79228 - DNA, 110 bp, synthetic construct
  source 1..110: mol_type = other DNA
gcaaagtagtgacattaagattcctaaagctgggaggaaaaggggtgaggactcgactgagctcattccaagagcaaatatttcttgagaatctcaaaccagatgtagag

SEQ ID NO: 79229 - DNA, 110 bp, synthetic construct
  source 1..110: mol_type = other DNA
aattcagtcaagcggctgcaggagggagcagagatctggggtgaaaagctgggatcataattcaggggccattgttccagtgtagttggttagacctaactacaccagtc

SEQ ID NO: 79230 - DNA, 110 bp, synthetic construct
  source 1..110: mol_type = other DNA
cataattcaggggccattgttccagtgtagttggttagacctaactacaccagtctaggaaggtctgcaagggactcagtcacagcgggatgtggataacgggaggtgga

SEQ ID NO: 79231 - DNA, 110 bp, synthetic construct; identical to SEQ ID NO: 79229
  source 1..110: mol_type = other DNA

SEQ ID NO: 79232 - DNA, 110 bp, synthetic construct; identical to SEQ ID NO: 79230
  source 1..110: mol_type = other DNA

SEQ ID NO: 79233 - DNA, 110 bp, synthetic construct
  source 1..110: mol_type = other DNA
acagaagtagcttgattacaatcacgttcctttaatgatctcattttaactgcagcttgatgtctctcttcccttccaagactcgccttcagagcgctgttgcatcttca

SEQ ID NO: 79234 - DNA, 110 bp, synthetic construct
  source 1..110: mol_type = other DNA
cttgatgtctctcttcccttccaagactcgccttcagagcgctgttgcatcttcatgcttggatgtctgtccttctgtttctgcttccttgctattcaacagagttatga

SEQ ID NO: 79235 - DNA, 110 bp, synthetic construct
  source 1..110: mol_type = other DNA
caaagcatacaagcacttccctttgcccaatgaaatctactttttcctgcctaatttatttcttctcatctttcaagaatcagctcaaggttaactcactaaaaaaaaaa

SEQ ID NO: 79236 - DNA, 110 bp, synthetic construct
  source 1..110: mol_type = other DNA
ttatttcttctcatctttcaagaatcagctcaaggttaactcactaaaaaaaaaaactcttcctggagtttcaggagttaagaaattgactagcaaccataaggatgtgg

SEQ ID NO: 79237 - DNA, 110 bp, synthetic construct
  source 1..110: mol_type = other DNA
acattagtacattctgggaggagggtatactattaacctattgcacagattaggagactgagactcacagaggataagctatgtagccacagtatttgttggacttaatc

SEQ ID NO: 79238 - DNA, 110 bp, synthetic construct
  source 1..110: mol_type = other DNA
gactgagactcacagaggataagctatgtagccacagtatttgttggacttaatccgaagacatatttatggggtgctaaatatgagcagaaattatctgttttataatc

SEQ ID NO: 79239 - DNA, 110 bp, synthetic construct
  source 1..110: mol_type = other DNA
caaaagtctgaagagacggttttgtttgaaaaagcttcttgctcccctctgctgctctacctcaacaaagaattcctgctctaactaaatagaactacttctccagaaat

SEQ ID NO: 79240 - DNA, 110 bp, synthetic construct
  source 1..110: mol_type = other DNA
acaataaatgcacccatggcttctcggtaatagacccttgtcatgtttccaaatctttcttgacctattaccaaaaagagaaggaaagcaaaaactcattacagttttaa

SEQ ID NO: 79241 - DNA, 110 bp, synthetic construct
  source 1..110: mol_type = other DNA
tttcttgacctattaccaaaaagagaaggaaagcaaaaactcattacagttttaaatgcaatcatatactggaacctaataagacctcatatgaacagatcactcagtaa

SEQ ID NO: 79242 - DNA, 110 bp, synthetic construct
  source 1..110: mol_type = other DNA
aaagcccttaggtgcgaccagtagtagatatctgtggtgagaagaaggccactgtggtacaaagtgggagtcagagctcaggaaggggcacaggtaaggaggccatcttt

SEQ ID NO: 79243 - DNA, 110 bp, synthetic construct
  source 1..110: mol_type = other DNA
ggtacaaagtgggagtcagagctcaggaaggggcacaggtaaggaggccatctttataggaaggtggggttttttttttggtttttggtttttgtctttttgccttttct

SEQ ID NO: 79244 - DNA, 110 bp, synthetic construct
  source 1..110: mol_type = other DNA
cttttggccatgatgatgttttccaaagcacatcccctttgttgtctcaattctccggattgctgagttacttgacaatgcagtgttgggttcaataagcttgaggaaga

SEQ ID NO: 79245 - DNA, 110 bp, synthetic construct
  source 1..110: mol_type = other DNA
cggattgctgagttacttgacaatgcagtgttgggttcaataagcttgaggaagatgggagagaattaacaaatgaatgattgggtttatacaccgtaagacttctcggt

SEQ ID NO: 79246 - DNA, 110 bp, synthetic construct
  source 1..110: mol_type = other DNA
cctcaaaaggcacagtagtaaattctaagcttaaaaaacatcctccttgtctacttagaaatcaagattatgcagcatttttagaaatgaaattttcccacaggagtttt

SEQ ID NO: 79247 - DNA, 110 bp, synthetic construct
  source 1..110: mol_type = other DNA
cactgatggcaggtgggctctccagcatgttgtgttttggtttggggtgaataccttgctacctggttaattaccctcattgaacctagggcattaatgattttgagatg

SEQ ID NO: 79248 - DNA, 110 bp, synthetic construct
  source 1..110: mol_type = other DNA
agcgggacagaagggaggagggaccgatagcttcctatttcagacaaagctcaggttaacagatgatcttgtttaatctttacctcaaccctaggaccatgctgaatggt

SEQ ID NO: 79249 - DNA, 110 bp, synthetic construct
  source 1..110: mol_type = other DNA
ttaacagatgatcttgtttaatctttacctcaaccctaggaccatgctgaatggttgtgcagttggcttcctgcatttggggttagtagtctcctacccagactatgact

SEQ ID NO: 79250 - DNA, 110 bp, synthetic construct; identical to SEQ ID NO: 79248
  source 1..110: mol_type = other DNA

SEQ ID NO: 79251 - DNA, 110 bp, synthetic construct; identical to SEQ ID NO: 79249
  source 1..110: mol_type = other DNA

SEQ ID NO: 79252 - DNA, 110 bp, synthetic construct
  source 1..110: mol_type = other DNA
aatccccttattttagggcccatcactttactttgcaaaattcctgttgccatataacatattcacagcttccagagactcaggtgggaacatctttggaaccgttgttc

SEQ ID NO: 79253 - DNA, 110 bp, synthetic construct
  source 1..110: mol_type = other DNA
aaagtcaatgatcaatatactctctccaccaactccccgcccttaattcagtacgtgcaaaggcccctgggtagggttggagtgtttctggattatgacaatgggaccgt

SEQ ID NO: 79254 - DNA, 110 bp, synthetic construct
  source 1..110: mol_type = other DNA
gacgacatttattacctgctctgcccatgtcccttctctaacacagactatgatggtgcttctggtttttgattcctgtgttcaacattcctggagctatttgagtattc

SEQ ID NO: 79255 - DNA, 110 bp, synthetic construct
  source 1..110: mol_type = other DNA
gtgcttctggtttttgattcctgtgttcaacattcctggagctatttgagtattcatattttcccagtatgaatatctgactaaaaggccaaatatcccttttgggaatg

SEQ ID NO: 79256 - DNA, 110 bp, synthetic construct
  source 1..110: mol_type = other DNA
atatatatcgcatcacacaatgaagtttgcatacccttcaattaatactttaacttttcttgtcatgacaaaaattcctcaggggacttttcgccgtatttacacactca

SEQ ID NO: 79257 - DNA, 110 bp, synthetic construct
  source 1..110: mol_type = other DNA
tgaagccattacttttataccatagctacagttattcattagtatctacacgggcttgctgcctagacatgccccacccctctcaccatggataccataacgtatgtaca

SEQ ID NO: 79258 - DNA, 110 bp, synthetic construct
  source 1..110: mol_type = other DNA
atattacgtttagtcatcatgtctccttaaacttctctaaattgtgactgtttctcaggctttttgtacatctgatgatcttgacaatcttgaaaaaatggtcgggaatt

SEQ ID NO: 79259 - DNA, 110 bp, synthetic construct
  source 1..110: mol_type = other DNA
attattattggtttttctaaaattgttctgtgtttttgttctctgcttccccttgtggtttctggtggcagctggtgggtttactggactgaaagcatatgaaaatgtgc

SEQ ID NO: 79260 - DNA, 110 bp, synthetic construct
  source 1..110: mol_type = other DNA
catgcttcacaggagtttggttgtagcacagttttttttgtttttgtttttgttttcttttcgtgcactgtcccaaggaggaagagctatacctggaccgaaatagactc

SEQ ID NO: 79261 - DNA, 110 bp, synthetic construct
  source 1..110: mol_type = other DNA
tcttttcgtgcactgtcccaaggaggaagagctatacctggaccgaaatagactcacagaggcatcttataagcatagtcttggtagtccacttggtagaattttctggg

SEQ ID NO: 79262 - DNA, 110 bp, synthetic construct
  source 1..110: mol_type = other DNA
tccctttcaaagtggatcacacgccactgcaaaaacactgtcttcatcgtgttccttctcaaccgaaacccctcagtgcctctcagctgccctaagatggcactgactcc

SEQ ID NO: 79263 - DNA, 110 bp, synthetic construct
  source 1..110: mol_type = other DNA
tgcttatggaagttaacagtaaggtagacactgcctcaaatgtcacactagacagattcttctctcatcactgctttcctgagctcagaaacaaagtgaaggggattaat

SEQ ID NO: 79264 - DNA, 110 bp, synthetic construct
  source 1..110: mol_type = other DNA
ctcaaggtgtccagtttgcatctgaacctgtgggaggagctccctggtaccgttccataactgggatgggtctcttgaaggaatggatctattttgtcagcgggacttcc

SEQ ID NO: 79265 - DNA, 110 bp, synthetic construct
  source 1..110: mol_type = other DNA
ctctttgctggctgtgggcaccccgggggctgtcatcgggaaaagtatgacaagtccttcctgcctcttctggttctggtgtgtctgctacacagaagctcgtgactggg

SEQ ID NO: 79266 - DNA, 110 bp, synthetic construct
  source 1..110: mol_type = other DNA
ccttcctgcctcttctggttctggtgtgtctgctacacagaagctcgtgactgggggctttggcacccctgggaattagagagctgctcacacttttattcattcgtctg

SEQ ID NO: 79267 - DNA, 110 bp, synthetic construct
  source 1..110: mol_type = other DNA
taatgaaacacagcaaatcgcatccttttagaggatactcgaattacctctggaaggaagtactttgttaatgagctgagctgagctgcctcatttaggggatgagctgt

SEQ ID NO: 79268 - DNA, 110 bp, synthetic construct
  source 1..110: mol_type = other DNA
atctcatgaaatggttttaacaataaaaggaacacttaaagcatgggctgtgctttttgccgtaagtccttgatgcatagtgagcttttgctacctgctacctgtcatca

SEQ ID NO: 79269 - DNA, 110 bp, synthetic construct
  source 1..110: mol_type = other DNA
aggccaagctctctgctcccttcccacccctttgtcagtgaaaccagattccctccccagtggtatttgagttttcctctcctctctgctgctttttccagcagctgtgc

SEQ ID NO: 79270 - DNA, 110 bp, synthetic construct
  source 1..110: mol_type = other DNA
cccagtggtatttgagttttcctctcctctctgctgctttttccagcagctgtgcgttcctacccctccctggcttccactgaacctcccccaggttctgccccttcccc

SEQ ID NO: 79271 - DNA, 110 bp, synthetic construct
  source 1..110: mol_type = other DNA
gcagaccacaatgaaataagagcacaggccaccaaagacatatctccaccatgagaaggtgttacccaacagatctctgaagaacagtatcttgacctgcctgttttcca

SEQ ID NO: 79272 - DNA, 110 bp, synthetic construct
  source 1..110: mol_type = other DNA
aaggtgttacccaacagatctctgaagaacagtatcttgacctgcctgttttccagacttttcttttttaggatacttgtatgaggctctcttgtcctaaattaaaaagc

SEQ ID NO: 79273 - DNA, 110 bp, synthetic construct
  source 1..110: mol_type = other DNA
agctccctcaaccaaggaaacagaaagcttcacaaacacctgagttccaccaacgccccctcccccacgcagcccacggcaactgatcagcactggaacattccaaccgg

SEQ ID NO: 79274 - DNA, 110 bp, synthetic construct
  source 1..110: mol_type = other DNA
ggttcttcctgtctctacgcagaaggaattcagccagagataaatcgataggcaagaaatagatttatcaggattggttgctcgtgagagaggcaagcagacaggaagga

SEQ ID NO: 79275 - DNA, 110 bp, synthetic construct
  source 1..110: mol_type = other DNA
gaaatagatttatcaggattggttgctcgtgagagaggcaagcagacaggaaggaagcgctgctccgaggatccagtgggcggcagttttatcttctaaggggagtgggc

SEQ ID NO: 79276 - DNA, 110 bp, synthetic construct
  source 1..110: mol_type = other DNA
atgggctttctcttttagtctgcaattactaacttagtttctggagaagttcattgctagttcaaaatgcatgtcaaccaaaatatatcttcctctgatattaaaaaata

SEQ ID NO: 79277 - DNA, 110 bp, synthetic construct
  source 1..110: mol_type = other DNA
gctggctcctgggaccctattatttagatcagaatgatggataatgaaactacgcagagaagtggatgggcctcgtgtcttcacctctgcactgacagagagggatgggg

SEQ ID NO: 79278 - DNA, 110 bp, synthetic construct
  source 1..110: mol_type = other DNA
tacagaccatgctgcaggagcaggcctgagggagtgtctctgctccttggctggaccctgtagctaagggtgttctctctgtgtgcatcatgtccctccctcctcacccc

SEQ ID NO: 79279 - DNA, 110 bp, synthetic construct
  source 1..110: mol_type = other DNA
ccctgtagctaagggtgttctctctgtgtgcatcatgtccctccctcctcacccctgtctctcaatcgcaaatggctctgaggctgtgtgtctgccctggagcctgccca

SEQ ID NO: 79280 - DNA, 110 bp, synthetic construct; identical to SEQ ID NO: 79278
  source 1..110: mol_type = other DNA

SEQ ID NO: 79281 - DNA, 110 bp, synthetic construct; identical to SEQ ID NO: 79279
  source 1..110: mol_type = other DNA

SEQ ID NO: 79282 - DNA, 110 bp, synthetic construct
  source 1..110: mol_type = other DNA
tctcaaatccaactcgtgtcatgcaagattctcctaactgcacctgaggattactggaacggcttcctaatcagttctttcttccactctccccactggcaaagtaatct

SEQ ID NO: 79283 - DNA, 110 bp, synthetic construct
  source 1..110: mol_type = other DNA
cctgagtctgtctgccttgctttctcttccagtagcagtctttcaggactttggttaaagtcacaatgcaacttggagagcttgtggccgtgagttttgacattccctga

SEQ ID NO: 79284 - DNA, 110 bp, synthetic construct
  source 1..110: mol_type = other DNA
cagcagcttgcaaaacttatccaagaatcaccaactgttgaactgaaagacaacctagagtgcgaactggaggcattagtgggaaggatggaggcaaaagccaatcagat

SEQ ID NO: 79285 - DNA, 110 bp, synthetic construct
  source 1..110: mol_type = other DNA
gtttcttcaaacacatttgccaaaaacataatccttggaaggatcaagtgtgcataaaccttatgcttagctatttctatccaaaaatgtaggtttttgatattttggtt

SEQ ID NO: 79286 - DNA, 110 bp, synthetic construct
  source 1..110: mol_type = other DNA
tgataacaggtcaacaaggctagtcttgaaatcagagcagatttcttttggccagatggaggctgcaagtggcaagtcctaatttatgtatgaagtctagttttcaatct

SEQ ID NO: 79287 - DNA, 110 bp, synthetic construct
  source 1..110: mol_type = other DNA
ctgctgtcctgcatcctctgagtacctcctgcccagttatgctggtggcagaatgctttgttttttttgccagctaccctactgcactagtttcactgttgtgctatata

SEQ ID NO: 79288 - DNA, 110 bp, synthetic construct
  source 1..110: mol_type = other DNA
ttcagtcagtctgtgcactgccctgggtgtgggggcctgctgagaactgcctctgtgattgttacagtcctgtgggatccaggaatgtaagctcccatggtccccagagt

SEQ ID NO: 79289 - DNA, 110 bp, synthetic construct
  source 1..110: mol_type = other DNA
actgagccatgatgggaattcctacataagcaacttctatatgaatagtctcccttagaagctcagcatcctgtggtggtgttaggatggcatctgtaccacccaaacca

SEQ ID NO: 79290 - DNA, 110 bp, synthetic construct
  source 1..110: mol_type = other DNA
gactatgaagtgctcttatgcttattctcttgctccatcaccattacagagtagcccggtgtgatcttgatgtctgtgatttcatttaagttcaacagagaacacccagg

SEQ ID NO: 79291 - DNA, 110 bp, synthetic construct
  source 1..110: mol_type = other DNA
ccggtgtgatcttgatgtctgtgatttcatttaagttcaacagagaacacccaggcccagctgtgagtgtcaggtcagcttctaggagcaccacaactgaactgatccag

SEQ ID NO: 79292 - DNA, 110 bp, synthetic construct
  source 1..110: mol_type = other DNA
aaagccaatcatctgtccttgctgtgatcacctacatttatcactgatccttttatcatctcttgttagtttttcttttccgaaaaagggtgagctgatattgtgtgtag

SEQ ID NO: 79293 - DNA, 110 bp, synthetic construct
  source 1..110: mol_type = other DNA
tcatctcttgttagtttttcttttccgaaaaagggtgagctgatattgtgtgtagtgaacccaaggggcacctcttaataaatcacagaggagtaagtaggctatatgga

SEQ ID NO: 79294 - DNA, 110 bp, synthetic construct
  source 1..110: mol_type = other DNA
actgaacctccctggtgttgagactgcagaactccaaatgcaatagtttgcatctattaaccccagacactgataaccaactgtaatggaaaaaatgaaaatcatttaaa

SEQ ID NO: 79295 - DNA, 110 bp, synthetic construct
  source 1..110: mol_type = other DNA
tgttcaatatctagggacaccagattggctatattaagtctttccctccttattggtttgcccagtgggaaaagtggtcctcctcccgttcaaagctttcattatgacag

SEQ ID NO: 79296 - DNA, 110 bp, synthetic construct
  source 1..110: mol_type = other DNA
gtttgcccagtgggaaaagtggtcctcctcccgttcaaagctttcattatgacagcattctccacacctaataccagaagtgattcagatactgtgtcaaagaaaacatg

SEQ ID NO: 79297 - DNA, 110 bp, synthetic construct; identical to SEQ ID NO: 79295
  source 1..110: mol_type = other DNA

SEQ ID NO: 79298 - DNA, 110 bp, synthetic construct; identical to SEQ ID NO: 79296
  source 1..110: mol_type = other DNA

SEQ ID NO: 79299 - DNA, 110 bp, synthetic construct
  source 1..110: mol_type = other DNA
tgtcacatatgacctttattatactgagagatgtttcctttacatacgctttgttgagaatttttattataaatggatgttaaactttgtcaagtgcttcttctgcatct

SEQ ID NO: 79300 - DNA, 110 bp, synthetic construct; identical to SEQ ID NO: 79299
  source 1..110: mol_type = other DNA

SEQ ID NO: 79301 - DNA, 110 bp, synthetic construct
  source 1..110: mol_type = other DNA
tggctctaggaagaaagagctggaaaaaaaaaaatcctgaatctgactgagcattaaagttctagggctattaagattcaatgtgctatgatattatagacatcttttca

SEQ ID NO: 79302 - DNA, 110 bp, synthetic construct
  source 1..110: mol_type = other DNA
caaaaagcacacaaatatacaggcagacagatgcacagacacataccacacacgcgcacacacacacacatgcacacacactttacaaaaccaaagaaaacttgagcaaa

SEQ ID NO: 79303 - DNA, 110 bp, synthetic construct
  source 1..110: mol_type = other DNA
ttaattaatgagtgattatagcattatttattgagcaatcattctcaagctaaagggcagtatctgatgatattctgtagaacgctgaatgtggctttgttatattcaat

SEQ ID NO: 79304 - DNA, 110 bp, synthetic construct
  source 1..110: mol_type = other DNA
gacaacactggattcttaacccactgtgacacaagaggactccctaaaatagtataatttaggcaagctataccagtatcttttgaaggttgaattgataattaagtgcc

SEQ ID NO: 79305 - DNA, 110 bp, synthetic construct
  source 1..110: mol_type = other DNA
cacacaatgcagtatggcaaaagctgactattacattatgccatcttttcagactgtataccttattttaaatttttaaaaaatttttggccaccccatggcacatggag

SEQ ID NO: 79306 - DNA, 110 bp, synthetic construct
  source 1..110: mol_type = other DNA
taaaaatattgccattttcttccaccagatgttttcagtgctttatttgtggttagtcctattacttacctgttttcacttcagtgtgcttctttttctcttcacctgcc

SEQ ID NO: 79307 - DNA, 110 bp, synthetic construct
  source 1..110: mol_type = other DNA
gtcctattacttacctgttttcacttcagtgtgcttctttttctcttcacctgccaggtaatgttagtcaatagacatcaaattttttagctgggtcttgattggagggc

SEQ ID NO: 79308 - DNA, 110 bp, synthetic construct
  source 1..110: mol_type = other DNA
gtgcctctcatgtggctatgactacacagaccgggggacagatctctcacgatattaagcaggatcgaacatggggaaagaagtattcaggctgaaactgactagtgggt

SEQ ID NO: 79309 - DNA, 110 bp, synthetic construct
  source 1..110: mol_type = other DNA
taagcaggatcgaacatggggaaagaagtattcaggctgaaactgactagtgggttgagctgctttatggggtgttgagggtaggaaaccagttcctggaagtccgaatt

SEQ ID NO: 79310 - DNA, 110 bp, synthetic construct; identical to SEQ ID NO: 79308
  source 1..110: mol_type = other DNA

SEQ ID NO: 79311 - DNA, 110 bp, synthetic construct; identical to SEQ ID NO: 79309
  source 1..110: mol_type = other DNA

SEQ ID NO: 79312 - DNA, 110 bp, synthetic construct
  source 1..110: mol_type = other DNA
aaatggatttcatgacattaagcttgacacttcatgatacgaatcacaaaccctaccttattctctcctgaaaagctcttcttcaaagggtttaaactgcatccataaga

SEQ ID NO: 79313 - DNA, 110 bp, synthetic construct
  source 1..110: mol_type = other DNA
atgactttgtggcttacctagctattcaatgtgagtcttaaaggatagctaaggtttttaaaagaagtgtattataaatggagtgaaccatgcagaagaaaaaaagacaa

SEQ ID NO: 79314 - DNA, 110 bp, synthetic construct
  source 1..110: mol_type = other DNA
ggattatgtgtgggcaaactttctgggtgaatagtgggaaaaacagtgcccttgtcccagaagctctatttcacttcaaacttcctgaactgacacaagccagataggag

SEQ ID NO: 79315 - DNA, 110 bp, synthetic construct
  source 1..110: mol_type = other DNA
acacagagagaagtggagagtgttatcaccaggtcagtacatgttaccctcccgtttttgctgtagctattgatcttcctgccataattgattctgctagtgaaacagac

SEQ ID NO: 79316 - DNA, 110 bp, synthetic construct
  source 1..110: mol_type = other DNA
gcttttgaaacacaaagggatagcagtgtctcctgtaacccctcctgttaccaagtagctttcacttgtttttcaaggaaagaaggtaaaaacatcaaagccagaaattt

SEQ ID NO: 79317 - DNA, 110 bp, synthetic construct
  source 1..110: mol_type = other DNA
gggatatactgacctttctgaagcagttttctatttcttggtctactgcattctctgtttattggcctatgtcctaccttctcagtagtaatctgatttcagctttgttt

SEQ ID NO: 79318 - DNA, 110 bp, synthetic construct
  source 1..110: mol_type = other DNA
ccacaacgggaactcctgcactcttaactcttaatttgagccgtatctgtgaccaacactgcagctggtagcaatgccagatcctttaacccactgagtagagccatgga

SEQ ID NO: 79319 - DNA, 110 bp, synthetic construct
  source 1..110: mol_type = other DNA
aactatatagaaacagtgaaaaaaatggttgcaagggaagtaggaagaagagcaagatgaacagattgagtacagaggatttttaaagcaatgaaactattctgtatgac

SEQ ID NO: 79320 - DNA, 110 bp, synthetic construct
  source 1..110: mol_type = other DNA
gcaggttaggggtggagttccttgattttcacctcagatccaccttccacaagagaggagggatttttgtccctatgagtctggaatggaagagtcatggcttcagcaca

SEQ ID NO: 79321 - DNA, 110 bp, synthetic construct
  source 1..110: mol_type = other DNA
aggagggatttttgtccctatgagtctggaatggaagagtcatggcttcagcacatgatgggtatttcttatctgcaaggttaattttactgtaatgagggcataacacg

SEQ ID NO: 79322 - DNA, 110 bp, synthetic construct; identical to SEQ ID NO: 79320
  source 1..110: mol_type = other DNA

SEQ ID NO: 79323 - DNA, 110 bp, synthetic construct; identical to SEQ ID NO: 79321
  source 1..110: mol_type = other DNA

SEQ ID NO: 79324 - DNA, 110 bp, synthetic construct
  source 1..110: mol_type = other DNA
atatggttttcacctagaaatatgcagtgaaatctaaagagttatttacagaaatactcagatgtaagtattactgtcctgctaaataaagaccctttttagctaccatg

SEQ ID NO: 79325 - DNA, 110 bp, synthetic construct
  source 1..110: mol_type = other DNA
gactgccctgatcagggttactgttagtgtacatttattatgcactttgtaccataccgatggcattcttagctatgtcctcctaaaaccaccgcagtagattagacact

SEQ ID NO: 79326 - DNA, 110 bp, synthetic construct
  source 1..110: mol_type = other DNA
accgatggcattcttagctatgtcctcctaaaaccaccgcagtagattagacactcagagaggttaagtacgcacctcgaagatttgcaccaaggtgcccttcctgcctg

SEQ ID NO: 79327 - DNA, 110 bp, synthetic construct
  source 1..110: mol_type = other DNA
cggagcgccgccaagtctcgcgccgtctcgcgagagtccaagttgaaggaacatggcgacgtctaatctgttaaaggtaagatcctccgtccggcttggtttttactccg

SEQ ID NO: 79328 - DNA, 110 bp, synthetic construct
  source 1..110: mol_type = other DNA
gcgacgtctaatctgttaaaggtaagatcctccgtccggcttggtttttactccggggctgctggttcagctctgagggaagggcttggcttaggttccgcggcgaagtg

SEQ ID NO: 79329 - DNA, 110 bp, synthetic construct
  source 1..110: mol_type = other DNA
gacactcaaaatctaagcatatttatactttaggagtgagaatctttctcatatagttgctgtgttgtttcagacattcaggaatgtctggatttgccagttccgttttt

SEQ ID NO: 79330 - DNA, 110 bp, synthetic construct
  source 1..110: mol_type = other DNA
ggttttttttaaaaatttagctttaccgtagttatctcttgatagcatttcctctgttctagaaaattgtttcctcttatttttgccatagcacattatactccatctgt

SEQ ID NO: 79331 - DNA, 110 bp, synthetic construct; identical to SEQ ID NO: 79330
  source 1..110: mol_type = other DNA

SEQ ID NO: 79332 - DNA, 110 bp, synthetic construct
  source 1..110: mol_type = other DNA
gatttggaagttctagccacaacaattagagaataaagagaaataaaagggattcaaatgggaaaagaaaaaccgtcactgtttggagatgacgtattactatacataga

SEQ ID NO: 79333 - DNA, 110 bp, synthetic construct
  source 1..110: mol_type = other DNA
cctcttcttttatttccctatgagttgatgtatgtatttagttttgatactgcgccagctgggagatgaacacctataaagctcgtcagggttaagtttgcttctgggga

SEQ ID NO: 79334 - DNA, 110 bp, synthetic construct
  source 1..110: mol_type = other DNA
cagctgggagatgaacacctataaagctcgtcagggttaagtttgcttctggggaggaaccaaagtgaactcctcaagcaagacccctctgtccacagccctcctgtgtt

SEQ ID NO: 79335 - DNA, 110 bp, synthetic construct; identical to SEQ ID NO: 79333
  source 1..110: mol_type = other DNA

SEQ ID NO: 79336 - DNA, 110 bp, synthetic construct; identical to SEQ ID NO: 79334
  source 1..110: mol_type = other DNA

SEQ ID NO: 79337 - DNA, 110 bp, synthetic construct
  source 1..110: mol_type = other DNA
aagctggcgtttttgggcaaggacatctcacacatgcccttgcagtttatagctagaaaaagacatgcctgtgcatctttgtcctttgtacttttctagtccatgcatat

SEQ ID NO: 79338 - DNA, 110 bp, synthetic construct
  source 1..110: mol_type = other DNA
gaaaaagacatgcctgtgcatctttgtcctttgtacttttctagtccatgcatatatatatccttttcctgcatagtgttctctgccataacgttttagttgtgagtgta

SEQ ID NO: 79339 - DNA, 110 bp, synthetic construct
  source 1..110: mol_type = other DNA
gtctaggaactagctccatgcgcttcagtgtattgctcagaaaatcagagtgacagattctggagcagaagtttattttagagagcaaatttaaaagtcactgactattt

SEQ ID NO: 79340 - DNA, 110 bp, synthetic construct
  source 1..110: mol_type = other DNA
gattctggagcagaagtttattttagagagcaaatttaaaagtcactgactattttccttgcatcaaagacacttgtcttctgaagcagagttggtggtactgggaagga

SEQ ID NO: 79341 - DNA, 110 bp, synthetic construct
  source 1..110: mol_type = other DNA
aggccctgcaccaggcacattataaagggcatcccaatttgtccctcagctcaatcccatgaagagggtattagagctgccatattatgaaaaagacaactaatgggtta

SEQ ID NO: 79342 - DNA, 110 bp, synthetic construct
  source 1..110: mol_type = other DNA
tggaacaagtctccattaactttttcttaacaaaataactagaaaaggcagtgttttagcaaataagcaaataattaccaaataagtactcttttgggcccagtttggag

SEQ ID NO: 79343 - DNA, 110 bp, synthetic construct
  source 1..110: mol_type = other DNA
ccgttggaacccaggagtcaagtaggaagcataactcatcctgggttagctggtgtttccccagttttagaactgaatgtccatgtcctgggaaaccagtcagacccagg

SEQ ID NO: 79344 - DNA, 110 bp, synthetic construct
  source 1..110: mol_type = other DNA
tttccccagttttagaactgaatgtccatgtcctgggaaaccagtcagacccaggcaaagcatgatggctggtcaccctacaccaccacggtaggaggaagcacaggtca

SEQ ID NO: 79345 - DNA, 110 bp, synthetic construct
  source 1..110: mol_type = other DNA
gaaaaatgatgctcccaggaaaagaagggataattgctgcagaaggtccttcaacagccaagagaggaggggctatgggacccaagcagaagagcttgcacacagaggtt

SEQ ID NO: 79346 - DNA, 110 bp, synthetic construct
  source 1..110: mol_type = other DNA
ccttaaggttataaatacattctctcatttactaccatctagaaacttcattccacctttaacatttaggctcacaattcatagtccctctagagacaccagctaaaaat

SEQ ID NO: 79347 - DNA, 110 bp, synthetic construct
  source 1..110: mol_type = other DNA
cacctgattctaattctactatggtcctttgcagatgggaatactgttataatgagagaaaccaagttgtctttctccagagctatgggtggataaaagggagaatttcc

SEQ ID NO: 79348 - DNA, 110 bp, synthetic construct
  source 1..110: mol_type = other DNA
ttcatatggaaatatctgtgaaactcctcatggaatgtttaaagctaaaatccctcagtaggagttataaagtgaaaagagattttgcagcaagcatataaataaaggat

SEQ ID NO: 79349 - DNA, 110 bp, synthetic construct
  source 1..110: mol_type = other DNA
accacaccactgtctgtagcttctcctcaaggacagcaagcacagttaccatcttcaggaaagatctgacttaagaaaaagggctcaaattaaccatttgattgcttgac

SEQ ID NO: 79350 - DNA, 110 bp, synthetic construct
  source 1..110: mol_type = other DNA
agtgcctcaggcaagggcccagagcagtgccatttggctgctggcctaaactgcaggtggacatcagagagcaaggtccagataaggacaactggaatgacagagcctgg

SEQ ID NO: 79351 - DNA, 110 bp, synthetic construct
  source 1..110: mol_type = other DNA
cagtgcacagagatagctctggggtcaggctcaggccataccatgcgtggaagcctcgtctcacatataacatagcagccccagatgttcaggatccttccccagcctag

SEQ ID NO: 79352 - DNA, 110 bp, synthetic construct
  source 1..110: mol_type = other DNA
ccactcttctaccttatgatgtgacgccaaggcagtggtttcccttaaatgtttccgtgtctacgaccctgtttaaaacagcttggcttttgtaagagtcctctcttctg

SEQ ID NO: 79353 - DNA, 110 bp, synthetic construct
  source 1..110: mol_type = other DNA
cgtgtctacgaccctgtttaaaacagcttggcttttgtaagagtcctctcttctgcttctccttgtggactaaccttctcaaggtttacttccccgtgccagcccctaaa

SEQ ID NO: 79354 - DNA, 110 bp, synthetic construct
  source 1..110: mol_type = other DNA
tagaaggggctcagggaagtagaagctgggaagagatcagactccaacaggtgttctccaaagaactggtcaaagaggcggctgggagagtggaaaggaaagaaggggcg

SEQ ID NO: 79355 - DNA, 110 bp, synthetic construct
  source 1..110: mol_type = other DNA
gatgccatccctggatgggaagggaaaattgtagcctgggtggaagaagaccacggagagaatgaatgctgagtattagactcggggctcgtggaacttggcactccctg

SEQ ID NO: 79356 - DNA, 110 bp, synthetic construct
  source 1..110: mol_type = other DNA
gagagaatgaatgctgagtattagactcggggctcgtggaacttggcactccctggctgcttcactcaggaaagaggactaaaaccagaacacactaagaagtttttagt

SEQ ID NO: 79357 - DNA, 110 bp, synthetic construct
  source 1..110: mol_type = other DNA
atctgtgcctatgtctgcttcattctcttactctctgggttagctggggaggggctaagggaagatgtggctttgcagacagagggaaagatcaaagtgttcccagtcgt

SEQ ID NO: 79358 - DNA, 110 bp, synthetic construct
  source 1..110: mol_type = other DNA
tttcattttgctggtggtttattttactgagcaaaagctttttagtttgatgtagtcctccttatttatttttgcttttgttacctttgcttttggtgtcaaatccaaaa

SEQ ID NO: 79359 - DNA, 110 bp, synthetic construct
  source 1..110: mol_type = other DNA
agctttttagtttgatgtagtcctccttatttatttttgcttttgttacctttgcttttggtgtcaaatccaaaaaaaatcattgccgagaccaaagtcaaggagcttac

SEQ ID NO: 79360 - DNA, 110 bp, synthetic construct
  source 1..110: mol_type = other DNA
cccaccaccccctccagctcaaccagagaagactggccaaagggcagactttgcgccataagccatctggagccattccagaccttcagctgtactcattgctgaaggga

SEQ ID NO: 79361 - DNA, 110 bp, synthetic construct
  source 1..110: mol_type = other DNA
ttcaccaccaatcagaaaagcctttaagaattggaaagctatccagctcatggcggacacaagctttccgaaaccctaatgttcacttgaaccttcaaatggcatcattg

SEQ ID NO: 79362 - DNA, 110 bp, synthetic construct
  source 1..110: mol_type = other DNA
tcctgatatcccaatcttggtttccatgcaagctggcattgactctcaaattatactgaaatgccttcctgcagaacacatatcctttttagccctttgctccattattc

SEQ ID NO: 79363 - DNA, 110 bp, synthetic construct
  source 1..110: mol_type = other DNA
ctgaaatgccttcctgcagaacacatatcctttttagccctttgctccattattcctttttcactccaccctcctcctggggccaagactcaaatcctagccacagctgt

SEQ ID NO: 79364 - DNA, 110 bp, synthetic construct
  source 1..110: mol_type = other DNA
ttccacagcactttggtgggaacaggaaattgggagcagccagcaaatacagagtgtgggactggggccagcatggcaagttggagctgagaatcaggagcagaccagag

SEQ ID NO: 79365 - DNA, 110 bp, synthetic construct
  source 1..110: mol_type = other DNA
gaaaatgtgttccctggtaatacacaagcagttcatgaatgagctacatctcatttataggtctgcttgttctgtgaagcaaagctcacgacaagagggaaagaacagaa

SEQ ID NO: 79366 - DNA, 110 bp, synthetic construct
  source 1..110: mol_type = other DNA
tataggtctgcttgttctgtgaagcaaagctcacgacaagagggaaagaacagaaatggtgaccctacaatactttgcctatgcccccacttggcatccttcatcttaag

SEQ ID NO: 79367 - DNA, 110 bp, synthetic construct
  source 1..110: mol_type = other DNA
ggaactcctaccctataccatatttcagtaagaatcctcatcttccacaaaccgctcaaaaatttcatctcagcattctagatacacaacacagagtgatacccagatct

SEQ ID NO: 79368 - DNA, 110 bp, synthetic construct
  source 1..110: mol_type = other DNA
gattatggtatttttaattgtaacagatagtgccagctccagttaggggagggacaaaactggaggccaagggtctaatcagaggactattggattagtccgggtgagag

SEQ ID NO: 79369 - DNA, 110 bp, synthetic construct
  source 1..110: mol_type = other DNA
aacttggtccttttgcaggatccctgagaagacccaactgccagggccactgtgtcagagggctgttttctttagaatcaagatcagaactgaggagacctcctacatcc

SEQ ID NO: 79370 - DNA, 110 bp, synthetic construct
  source 1..110: mol_type = other DNA
gactgaatgttctttctccatatctacttggtccagccaaaggccaccctttctgtggagccttccctgattacccagaacctccatgttactgtggcacatacttctgg

SEQ ID NO: 79371 - DNA, 110 bp, synthetic construct
  source 1..110: mol_type = other DNA
ggaggggaagataaggccctgtcccccagatctgggaaaagtgactgcggtggccacctgtccagcctttgagctggtggccgggtaaacagtgagcgcttctgggactc

SEQ ID NO: 79372 - DNA, 110 bp, synthetic construct
  source 1..110: mol_type = other DNA
acctgtccagcctttgagctggtggccgggtaaacagtgagcgcttctgggactcctagggacttagagcctgatcagcccccaggccacacacgcagaagttgacacaa

SEQ ID NO: 79373 - DNA, 110 bp, synthetic construct
  source 1..110: mol_type = other DNA
tcacaccaaaaccacatctgcctctttctagaccaaatccagctcagagtaagtcattaacagcctcatcctgagacgctgctttgggaaagattcccggtgttctcctt

SEQ ID NO: 79374 - DNA, 110 bp, synthetic construct
  source 1..110: mol_type = other DNA
tgtgcacattatgtgctcagcccctggctgggtcttgtgaacatggaaacctcgaacataggtctctactcttgaggggagctcagaggatcagaggcgactgaggggca

SEQ ID NO: 79375 - DNA, 110 bp, synthetic construct
  source 1..110: mol_type = other DNA
acacaattcatccataccttccaaaacctaaacttagtcacatccggctactagtggatctcaaggattcgcttgttaacctgatttgctttttaacacaaaatgaacat

SEQ ID NO: 79376 - DNA, 110 bp, synthetic construct
  source 1..110: mol_type = other DNA
aaggtaagaagggatacaagtttgtggccctcagaccagaggcacaaccaacaacaagaaggcaaccggacccaccagttcctaaaccccaacctagtgagagaaggcag

SEQ ID NO: 79377 - DNA, 110 bp, synthetic construct
  source 1..110: mol_type = other DNA
gggcttctggctgtgtcctcaaccctaactcgagggtgctcatggccctcctatcccactgtaaacggggctcagagaagccagactctgccctctgctacactgtcact

SEQ ID NO: 79378 - DNA, 110 bp, synthetic construct
  source 1..110: mol_type = other DNA
tcttctcccctctccattcagatccaagacattaacaagcaagtctctgcatgcagggaattttttctcctactcatctactgagaagtcagctttatggggttccggtt

SEQ ID NO: 79379 - DNA, 110 bp, synthetic construct
  source 1..110: mol_type = other DNA
gggaattttttctcctactcatctactgagaagtcagctttatggggttccggttttatacagggcaatatgacctcccactctgcttggacactatttttttctctggt

SEQ ID NO: 79380 - DNA, 110 bp, synthetic construct; identical to SEQ ID NO: 79378
  source 1..110: mol_type = other DNA

SEQ ID NO: 79381 - DNA, 110 bp, synthetic construct; identical to SEQ ID NO: 79379
  source 1..110: mol_type = other DNA

SEQ ID NO: 79382 - DNA, 110 bp, synthetic construct
  source 1..110: mol_type = other DNA
tcccaggccacatctctccccagctggcccacccaagcgcatgccagcctggcctcagcaaccccctccatccacctcgcaccgaattcaacttaatactctccggttag

SEQ ID NO: 79383 - DNA, 110 bp, synthetic construct
  source 1..110: mol_type = other DNA
cggaggcagagaagggagcgatgcatctacaagcaaagaaaagccaagaactgtcagcaaccccagaagctgagcaaggggcgaggaaggattcctcccctagagcagag

SEQ ID NO: 79384 - DNA, 110 bp, synthetic construct
  source 1..110: mol_type = other DNA
ccccacagcgcccctggaggcgagtactagtattacctccatctgtcctgcccccagctctcctcctccttttgtcttgcggaagatctgattccatctaagactctgca

SEQ ID NO: 79385 - DNA, 110 bp, synthetic construct
  source 1..110: mol_type = other DNA
agctctcctcctccttttgtcttgcggaagatctgattccatctaagactctgcacttctgtacaggtctgtgcataagccttgctcccacaggacacctgggtgcagcc

SEQ ID NO: 79386 - DNA, 110 bp, synthetic construct
  source 1..110: mol_type = other DNA
aaataaaaaaagagatggttggagaagagaaagagtggtcagaggcaggacaggaaggggctgagggggagccaaggctgcctctggatgaacggggcggagggaggtca

SEQ ID NO: 79387 - DNA, 110 bp, synthetic construct
  source 1..110: mol_type = other DNA
tttagtgtgtatcttcaggcaaccacgtctatccttggaatcccaaaatgagcgctgcagagggccactgtcagtaaactcagacagcatctaaaagtgtgccctgatct

SEQ ID NO: 79388 - DNA, 110 bp, synthetic construct
  source 1..110: mol_type = other DNA
cctttgcagaaaatatgtttttgaattgagttctgaaggaagggtgaggaggaggaatatttcacacagagcctatgcaaagtcctgtgccaggaaggagcatagtaagt

SEQ ID NO: 79389 - DNA, 110 bp, synthetic construct
  source 1..110: mol_type = other DNA
aatatttcacacagagcctatgcaaagtcctgtgccaggaaggagcatagtaagtcaaggaactgaaagaaaggcagaatggcagcaacacaaagagcctgagagagaag

SEQ ID NO: 79390 - DNA, 110 bp, synthetic construct
  source 1..110: mol_type = other DNA
agtcttctctggaaggagcccggactgtgtgtgtgacagaataaggtggtaacatataggctagtggaaggaaatctttggatcatgtacgttcatcagttaagcctagt

SEQ ID NO: 79391 - DNA, 110 bp, synthetic construct
  source 1..110: mol_type = other DNA
aaaattgtactgctgtgaaataaaacttcatgtggccatgctcatttgtttacatatattgccactgaggtagaatggcagagccaaataacttgtaacagagaccatac

SEQ ID NO: 79392 - DNA, 110 bp, synthetic construct
  source 1..110: mol_type = other DNA
atattgccactgaggtagaatggcagagccaaataacttgtaacagagaccatacagtgtgccaagtctaagatatttactatttggcactttacagaaaaagtctgcag

SEQ ID NO: 79393 - DNA, 110 bp, synthetic construct
  source 1..110: mol_type = other DNA
tggctcaaagcaggagctgagagtataacccgggtaagggatcaggaagggctttgtcaaggaagtgattagactactgtctacaaaggggtgggcaggatattccaggc

SEQ ID NO: 79394 - DNA, 110 bp, synthetic construct
  source 1..110: mol_type = other DNA
acccaggaagggagcgctcctgctgaggcccgacgggggttgtctttgctggcgcctcaggcctccttaggccaccattaaggtcgaggcccctttgacacagacaagac

SEQ ID NO: 79395 - DNA, 110 bp, synthetic construct
  source 1..110: mol_type = other DNA
gattaaggggcttggtcccacaaaatagcctccacttcagatgtcagctgcaatatcccccacccccgcctcgggttcaacaattttctagaactcacagaactctctga

SEQ ID NO: 79396 - DNA, 110 bp, synthetic construct
  source 1..110: mol_type = other DNA
gctctttccagacaaaaggtttggggaagccaattagggagggtgtggtgtacatgggacaccagctcagcgcacctgcttccaaggcaggttctcgctccactcctggg

SEQ ID NO: 79397 - DNA, 110 bp, synthetic construct
  source 1..110: mol_type = other DNA
ctgctgccacttcccacacccctcacacccctcaccccagcttctcctgagactcttcattcttccagaccaataaaaaggctgcctttcagggaaattcccttcccccg

SEQ ID NO: 79398 - DNA, 110 bp, synthetic construct
  source 1..110: mol_type = other DNA
gtttccggttcaagtctggccacagcagagggagggaggagagctgtagccctggctggagaggtaagctctagcccatcaccatggtcatgaccatgacattcttatgt

SEQ ID NO: 79399 - DNA, 110 bp, synthetic construct
  source 1..110: mol_type = other DNA
acgtactgtttgctgtgaggtgggaacctgccgaccctgtctttttggcatcactttgcccccattctcatccctgacaccttaaagacattcccaagaatcctaagcta

SEQ ID NO: 79400 - DNA, 110 bp, synthetic construct
  source 1..110: mol_type = other DNA
ttgcccccattctcatccctgacaccttaaagacattcccaagaatcctaagctaatgacagtcccaagaatcctaagctccatggagctccccaagggctctatggggt

SEQ ID NO: 79401 - DNA, 110 bp, synthetic construct
  source 1..110: mol_type = other DNA
ttcttatttctgttttggccaaggtcagacaagtactatgaagtgctgtggcaccaaaatcctagacaggagagagtttatgcaggttccatcatctggaagatttggta

SEQ ID NO: 79402 - DNA, 110 bp, synthetic construct
  source 1..110: mol_type = other DNA
ggcgggtgaccacaaggccagccaggccacactcagatgcctcagggaggtccgcagaggtcatcatctgtctcttcaagacatgagctccaacaaaataaaataaaaag

SEQ ID NO: 79403 - DNA, 110 bp, synthetic construct
  source 1..110: mol_type = other DNA
acccagctagtgtttccttgcagctctgggataaggggggaattctaggccacacggccatgctgtggatacttttctccagcggtaaacctacagggaaagggttttaa

SEQ ID NO: 79404 - DNA, 110 bp, synthetic construct
  source 1..110: mol_type = other DNA
ggccatgctgtggatacttttctccagcggtaaacctacagggaaagggttttaaaactttttagagttctttctctcttttaagttaaagtctgctcgggtggacgtgc

SEQ ID NO: 79405 - DNA, 110 bp, synthetic construct
  source 1..110: mol_type = other DNA
gcatttaagagggggagagatctcaccaagattagcgatgttttccaggaagcaagagagcatagctggtgccaccactggagtcacaccgagtggcatttgcgtgctct

SEQ ID NO: 79406 - DNA, 110 bp, synthetic construct
  source 1..110: mol_type = other DNA
aggtcatgaggatggaagctcatgaatggaattagtgtctttatataaggggctccagagagatccatcccttatctctttttctgtgtgatggttctgtgaacaaacaa

SEQ ID NO: 79407 - DNA, 110 bp, synthetic construct
  source 1..110: mol_type = other DNA
taggtggacatttttatttctctggggtagatactgcagaaaggaatggcagggcctcttggtgggtatgtgtccagcttttaaaagaattactggattgttttaaatag

SEQ ID NO: 79408 - DNA, 110 bp, synthetic construct
  source 1..110: mol_type = other DNA
ctcttggtgggtatgtgtccagcttttaaaagaattactggattgttttaaatagcaaactgttggagttcccatcatggcgtagcagaaacaaacccaactaatgtcca

SEQ ID NO: 79409 - DNA, 110 bp, synthetic construct
  source 1..110: mol_type = other DNA
actgtagtccctcagtcttaatccggaaccggcccacgccgttcattgagacagaagagctgcatttgggtttaaggtcagggctgtgggcccgcctctgagcctgcctt

SEQ ID NO: 79410 - DNA, 110 bp, synthetic construct
  source 1..110: mol_type = other DNA
cacacccaactgggtgcctctcttcctaactaaggcttaccttggcaaactgacactggttgtttctgtctgttctgtctctcatttcttgctggtcaaggaaggcacca

SEQ ID NO: 79411 - DNA, 110 bp, synthetic construct
  source 1..110: mol_type = other DNA
ctggttgtttctgtctgttctgtctctcatttcttgctggtcaaggaaggcaccacaccctttgtgggagagtgaagaggaattcctcctcttccatgtatatgtttctc

SEQ ID NO: 79412 - DNA, 110 bp, synthetic construct
  source 1..110: mol_type = other DNA
aattcctgctgtctatagagacagaaagtagagtggtagttggatgggctggggagggaggaatgggcagctactgacccacgggtgcagcgtttcacttctgggagatg

SEQ ID NO: 79413 - DNA, 110 bp, synthetic construct
  source 1..110: mol_type = other DNA
gggaggaatgggcagctactgacccacgggtgcagcgtttcacttctgggagatgaaaacagctctgcggatggatggtggcgatggctgaacaatgatgtgactctact

SEQ ID NO: 79414 - DNA, 110 bp, synthetic construct
  source 1..110: mol_type = other DNA
tagagatacatagtccatgggaaacccacgctcagacggacaccacctgctcttagcctaactctatacactcagctccctgagaagaagcccccccaccccaccaccac

SEQ ID NO: 79415 - DNA, 110 bp, synthetic construct
  source 1..110: mol_type = other DNA
aaaggcctttctggatcaagcttccaaacccagaccagaataagtcatctgcatattaaaacacaccatgaaggtgtttagcgtctcggtgaaattttgttgaaatttct

SEQ ID NO: 79416 - DNA, 110 bp, synthetic construct
  source 1..110: mol_type = other DNA
ttaaaacacaccatgaaggtgtttagcgtctcggtgaaattttgttgaaatttctaccccaaatgtttccgacaacttaatcatctctttctaaagtgctatatgctgat

SEQ ID NO: 79417 - DNA, 110 bp, synthetic construct
  source 1..110: mol_type = other DNA
tgagatagtacatagaaaagagtgcagagcccagctcttaagtgcatagtaaaccatactagattcagtgggtaggattaccagcctggagtcacagtgctgtgtggggc

SEQ ID NO: 79418 - DNA, 110 bp, synthetic construct
  source 1..110: mol_type = other DNA
tcaacctggaggaggtgccgccaccaccagctgagcagcacaggggccccagactggcctttgtgcccaaatagatctttcagcccagttcccagaaagaattctggaga

SEQ ID NO: 79419 - DNA, 110 bp, synthetic construct
  source 1..110: mol_type = other DNA
ggcctttgtgcccaaatagatctttcagcccagttcccagaaagaattctggagagcccaggcagaaaccactgaccgctggcacggagagttggtggtaaatctttcct

SEQ ID NO: 79420 - DNA, 110 bp, synthetic construct
  source 1..110: mol_type = other DNA
tgttgtgtttgggaagtactggctgtcccagtgcttcgatgccaaaggtgagttgttggttggcctgttcggcattggcatacctatcatggcctctagggggcagagtc

SEQ ID NO: 79421 - DNA, 110 bp, synthetic construct
  source 1..110: mol_type = other DNA
actccatatgagtttttaaaaatgaatcattgagaaaatcaatcatgcttgctgtaatactgtgattctcacacagggttttcggctataaggttgctgttgcctacaca

SEQ ID NO: 79422 - DNA, 110 bp, synthetic construct
  source 1..110: mol_type = other DNA
aatactgtgattctcacacagggttttcggctataaggttgctgttgcctacacaaagtgacccggggttgctttggggtttttttgaacatctcttatttttatgtttt

SEQ ID NO: 79423 - DNA, 110 bp, synthetic construct
  source 1..110: mol_type = other DNA
cgaaggctgagtgcgttagggggtttgccttcctttgcccttgggctgttcccagctcccacttacccattccctgaatgtcagtgaaggacgttttttatggaggtgaa

SEQ ID NO: 79424 - DNA, 110 bp, synthetic construct
  source 1..110: mol_type = other DNA
ctcccacttacccattccctgaatgtcagtgaaggacgttttttatggaggtgaaaatttcaaaccagaaagagaagcacggaggcaggtgtgggtaatattgtggggac

SEQ ID NO: 79425 - DNA, 110 bp, synthetic construct
  source 1..110: mol_type = other DNA
acatggtaaccggactatgcaatctctttctgcagctgcacagggcagagaccttgacaggtgagatggggccaaaaatgtctgttgaatagaatcgaattccacctgaa

SEQ ID NO: 79426 - DNA, 110 bp, synthetic construct
  source 1..110: mol_type = other DNA
gccacctaaggatggagactcctacagtctatagaagaaactgaagattaaaagtgggtgtaaaaatgtttgttttccttaattgagccagccacggcccttttggcaat

SEQ ID NO: 79427 - DNA, 110 bp, synthetic construct
  source 1..110: mol_type = other DNA
gggtgtaaaaatgtttgttttccttaattgagccagccacggcccttttggcaatgtaagatctcagatcttcttcccgtcttctttaatttttccttttagctctcact

SEQ ID NO: 79428 - DNA, 110 bp, synthetic construct; identical to SEQ ID NO: 79426
  source 1..110: mol_type = other DNA

SEQ ID NO: 79429 - DNA, 110 bp, synthetic construct; identical to SEQ ID NO: 79427
  source 1..110: mol_type = other DNA

SEQ ID NO: 79430 - DNA, 110 bp, synthetic construct
  source 1..110: mol_type = other DNA
aaattatcttgtgcagctgatttccctccaaaaggcagatggttcctgggatctgtgtgaaggtctggccatcgtcctgggcgtgaagttacgagacatacgggatgcat

SEQ ID NO: 79431 - DNA, 110 bp, synthetic construct
  source 1..110: mol_type = other DNA
tgtgaaggtctggccatcgtcctgggcgtgaagttacgagacatacgggatgcattcactatcaaggtgagatttagagaagaaaaaaaaggagtatattttcgaagggt

SEQ ID NO: 79432 - DNA, 110 bp, synthetic construct
  source 1..110: mol_type = other DNA
ttgcttcatggggtctgaaggtactgctacccacacccctcaacattttaatcactgtctttttctgcactagttgtatgtgataaacagctgttctgtctttactagaa

SEQ ID NO: 79433 - DNA, 110 bp, synthetic construct
  source 1..110: mol_type = other DNA
tgtctttttctgcactagttgtatgtgataaacagctgttctgtctttactagaagataaaggcatggggtagctgggtaacaagcctacctgtggatgggtttcagtag

SEQ ID NO: 79434 - DNA, 110 bp, synthetic construct
  source 1..110: mol_type = other DNA
tatcctccacatctcatcagctcaaggttggtccaaagccttcagtacttgtgactctcacataataacagttgccttcttctacggttctgggttgttcacacatctca

SEQ ID NO: 79435 - DNA, 110 bp, synthetic construct
  source 1..110: mol_type = other DNA
tatagatgatcacaaaacattctctatcatcaaagagctgtcagcccaggggatgaagacaagtaaatagttttaagcaatatgatgaacgttgtaataaagatatgttt

SEQ ID NO: 79436 - DNA, 110 bp, synthetic construct
  source 1..110: mol_type = other DNA
actctttcctctcagcccagccctggccttcggccccaggtaatccttgttcttgaatttgccacaagcctgatcactttagaggtggcaaaaggtagagttagggttcc

SEQ ID NO: 79437 - DNA, 110 bp, synthetic construct
  source 1..110: mol_type = other DNA
cttctgatctcactttcactcaggtccaagtacccctgcccctctcgcacattcgtccagtacaaattatatttattgtgggaggttaaggcagttctgtgatgcatctc

SEQ ID NO: 79438 - DNA, 110 bp, synthetic construct
  source 1..110: mol_type = other DNA
ctaccccagccatggacctagagggggccccacgcattaggccgtgataatgtataactgtagggctgcaggtgtggtagaaatctctcggccttttgagacagccaact

SEQ ID NO: 79439 - DNA, 110 bp, synthetic construct
  source 1..110: mol_type = other DNA
atgacctggaatttgagaaatgtgcatgtgcttttctaggcaatggcatccacggaagaaaaagcctacgagatcatgagggagcttgatgttagctatgtgctggtcat

SEQ ID NO: 79440 - DNA, 110 bp, synthetic construct
  source 1..110: mol_type = other DNA
aggcagaggcccccctgcattgttagatctggcctaagatattcttgttggtgtccagtctctctcccgagtacctcttcacatggttgtatttctatttgttggtccgg

SEQ ID NO: 79441 - DNA, 110 bp, synthetic construct
  source 1..110: mol_type = other DNA
cagtctctctcccgagtacctcttcacatggttgtatttctatttgttggtccggcacacaagacatgtgcaagtccacatccacaggaagtccactcaggtctaacaag

SEQ ID NO: 79442 - DNA, 110 bp, synthetic construct
  source 1..110: mol_type = other DNA
cgaataaatgacccctgcagttggacacagccctgcaccagggtaatggtttgacaagccgagggagggctagatttcagcccgcactctcccccgacccccggtcaggc

SEQ ID NO: 79443 - DNA, 110 bp, synthetic construct
  source 1..110: mol_type = other DNA
aagccgagggagggctagatttcagcccgcactctcccccgacccccggtcaggccatgcacccccggtgtgtgcatagctgtgcctggtggccctgcccctgccctttc

SEQ ID NO: 79444 - DNA, 110 bp, synthetic construct
  source 1..110: mol_type = other DNA
gcacttgggtgccctctccatctctctcattctctctgtgtctccatctctcttggagctgctcctgccctggggccccttattcctagcctatctgggacttctatgcc

SEQ ID NO: 79445 - DNA, 110 bp, synthetic construct
  source 1..110: mol_type = other DNA
tcttctgttttcatcacttcccctctctacaaaagtgtcccagaaagacggttgtgtttgtaaaaggaggggtgatggtcaaatgagggagccaagaaggcaggggacca

SEQ ID NO: 79446 - DNA, 110 bp, synthetic construct
  source 1..110: mol_type = other DNA
gctttgcttataacccccagaatgacctgcacaacagtggggacatcatagtctctgctttgctgttgttgttgttcagttgaatcatttaagagagaagctgctagaga

SEQ ID NO: 79447 - DNA, 110 bp, synthetic construct
  source 1..110: mol_type = other DNA
ccttctcacttaagcacctggcccttcaagtctgtaacctcgtctttctgcaggccagtagacttgtaaaagctgctctgtttgctccacctactagagtactggccact

SEQ ID NO: 79448 - DNA, 110 bp, synthetic construct
  source 1..110: mol_type = other DNA
tttattttagatgccttctggtccttggataaactccacttcatactgttatcagtgagccactataaacatctttgacttgtcagctgcagtgaattctattttctgct

SEQ ID NO: 79449 - DNA, 110 bp, synthetic construct; identical to SEQ ID NO: 79448
  source 1..110: mol_type = other DNA

SEQ ID NO: 79450 - DNA, 110 bp, synthetic construct
  source 1..110: mol_type = other DNA
aagaaccctactagtaaatacattcagcctgactgtctcgggtaaagaaaaatgcatgtcaattatttgtttagctacaaagaccatatccatgatggagaaaataaaat

SEQ ID NO: 79451 - DNA, 110 bp, synthetic construct
  source 1..110: mol_type = other DNA
tgaataatgctaacctcacacactttgaatttagaggaagagacagtcactgtgtgatcaagcaagctaaactttcttccaacagataaagttggaattgagactaggag

SEQ ID NO: 79452 - DNA, 110 bp, synthetic construct
  source 1..110: mol_type = other DNA
gatcaagcaagctaaactttcttccaacagataaagttggaattgagactaggagaacaggaaccatgcccatataggagaaactacacaagcaaagatgccaaggcagg

SEQ ID NO: 79453 - DNA, 110 bp, synthetic construct
  source 1..110: mol_type = other DNA
ccctggcatgtggagactcaacaggcaagctttgtctttattctcatcatgcaccagtaatattttaaggaatatgtgaatactttagtattacaagtaaccttgtatct

SEQ ID NO: 79454 - DNA, 110 bp, synthetic construct
  source 1..110: mol_type = other DNA
ctgggagaaagggcgacagttagctggtggagcacattgtaattttatcggtactggggaggggctaaagtagaggtgacccactagagttgacatagcaaaataccgct

SEQ ID NO: 79455 - DNA, 110 bp, synthetic construct
  source 1..110: mol_type = other DNA
gcattgcctacctaaccttgaggtttagagcgagtctgggaatttgagcaaggaagagagagaaagcttatgttcatccccaaattgaaggctcaacagccggcttgaga

SEQ ID NO: 79456 - DNA, 110 bp, synthetic construct
  source 1..110: mol_type = other DNA
gcaacctcatggttcctagtcggattcatcagacactgtgccacgaagggaactccccaagttgttaagtcttaatcaagtctagcttatcagttatttctttcatagat

SEQ ID NO: 79457 - DNA, 110 bp, synthetic construct
  source 1..110: mol_type = other DNA
cccaagttgttaagtcttaatcaagtctagcttatcagttatttctttcatagatcatgctattagtggagtatctaaaaagtcatcatcaaatccaagattatctagat

SEQ ID NO: 79458 - DNA, 110 bp, synthetic construct
  source 1..110: mol_type = other DNA
cccctggagctcttactggccaaaacggctacaggaggccacatactggaggttgttttaaaccagccagccatctggagacatgggtctgtactgggaatgtttaactt

SEQ ID NO: 79459 - DNA, 110 bp, synthetic construct
  source 1..110: mol_type = other DNA
acctaacctttgtttgcactgaaatttccatcattttatctcttattacactgtttctgagtgtcaagaatctccctttctagcctggaattacagccatactgactaat

SEQ ID NO: 79460 - DNA, 110 bp, synthetic construct
  source 1..110: mol_type = other DNA
ggtcttttagccaaggaccatagcgagcaacacgtggaccgaggtgtgatgagtagctgcctgcttggtcttgactgtgacacaacagtggcctggctcacgtcactaac

SEQ ID NO: 79461 - DNA, 110 bp, synthetic construct
  source 1..110: mol_type = other DNA
aaaccccaactctgaggctctcagtctcgttatctgctgctcctcctttttcttctctgaggggtgcgcactcctggtccatcgccctgtgcctgcagcttggagacaca

SEQ ID NO: 79462 - DNA, 110 bp, synthetic construct
  source 1..110: mol_type = other DNA
tctgaggggtgcgcactcctggtccatcgccctgtgcctgcagcttggagacacatgtttaccctttcccttcacctccagttgtttcctaaaaatggaatgctcagttt

SEQ ID NO: 79463 - DNA, 110 bp, synthetic construct
  source 1..110: mol_type = other DNA
acaacccatcgcctctcttctagggcctaagagtggggatgggctttggctgaacattgggggccaagctgagaactgagaagggtctctcacttgctagccttcttgcc

SEQ ID NO: 79464 - DNA, 110 bp, synthetic construct
  source 1..110: mol_type = other DNA
attgggggccaagctgagaactgagaagggtctctcacttgctagccttcttgccttctgcctggggcttgctttctgtctcggcctcgctcagctcctcggtggggctc

SEQ ID NO: 79465 - DNA, 110 bp, synthetic construct
  source 1..110: mol_type = other DNA
agcttcctgcacggagcaggtgcagacacctgtggggccattggagactagactagacagctgcatcctagaactatggagtctgagacccacaggcccctgcttaccag

SEQ ID NO: 79466 - DNA, 110 bp, synthetic construct
  source 1..110: mol_type = other DNA
atctgcatggggccctggggccctgtgggcactccgcatactacttctgaccagctgaaatcacagactcatactgtgtttcacaaaaccacaggcgtgctgtggtgcct

SEQ ID NO: 79467 - DNA, 110 bp, synthetic construct
  source 1..110: mol_type = other DNA
tgaaatcacagactcatactgtgtttcacaaaaccacaggcgtgctgtggtgcctgctccatgggtcgtagtttcaagggaggatcttgatcctggagccaagtcatcta

SEQ ID NO: 79468 - DNA, 110 bp, synthetic construct
  source 1..110: mol_type = other DNA
ctcaactctcctcccatcaaggtaatgttagtaactcgaggctatctgaaataagagttttgggtggaagacttaatctggtcttagcttcaggctgtgtgactttgttt

SEQ ID NO: 79469 - DNA, 110 bp, synthetic construct
  source 1..110: mol_type = other DNA
ggaggggagcgggaaagtggggagatgaaaggaagaaggaaagagacggagaaacacaattttcctttcacccagttcaaaatagaaatcaccagatcaatagaaaagaa

SEQ ID NO: 79470 - DNA, 110 bp, synthetic construct
  source 1..110: mol_type = other DNA
acaattttcctttcacccagttcaaaatagaaatcaccagatcaatagaaaagaaaacataatttaagccttaaaaaaagggggggggtttgtgttttctctctctctct

SEQ ID NO: 79471 - DNA, 110 bp, synthetic construct
  source 1..110: mol_type = other DNA
gttggtgcttctttctcatcctctcaactgcacaggacaagaatacagccctgcatggtctccaatctcatccttttgcatcacaggaccccttgctagctgagtccttc

SEQ ID NO: 79472 - DNA, 110 bp, synthetic construct
  source 1..110: mol_type = other DNA
tggtctccaatctcatccttttgcatcacaggaccccttgctagctgagtccttcgtgtcccagaagatgatacagaaagatcagatcagctctttgtgtgccaggtctg

SEQ ID NO: 79473 - DNA, 110 bp, synthetic construct; identical to SEQ ID NO: 79471
  source 1..110: mol_type = other DNA

SEQ ID NO: 79474 - DNA, 110 bp, synthetic construct; identical to SEQ ID NO: 79472
  source 1..110: mol_type = other DNA

SEQ ID NO: 79475 - DNA, 110 bp, synthetic construct
  source 1..110: mol_type = other DNA
gatctctttgattcagggcagctgcagcctgggaacactcactctcagagacagaaaatcactgcaaggcaatagtttctgaagaaaatgggagcatgttccaaattgta

SEQ ID NO: 79476 - DNA, 110 bp, synthetic construct
  source 1..110: mol_type = other DNA
aaatcactgcaaggcaatagtttctgaagaaaatgggagcatgttccaaattgtattatccctagaaattattttccccttcctaacgtcacagaagtctataaaacccc

SEQ ID NO: 79477 - DNA, 110 bp, synthetic construct
  source 1..110: mol_type = other DNA
ctcaaaggtaggcatttcttcaacttttagatagctgcagtttcccaaacatctaccttgtagcctactgcttctgtcccctctccagttccctcctgaagagaatttta

SEQ ID NO: 79478 - DNA, 110 bp, synthetic construct
  source 1..110: mol_type = other DNA
aaaagaatttcaaatacaacaggatcagactgttttttccccaaatatgaaaatcttcaaagaattttctagacttgggccaaagagctgccttttaggtattttattta

SEQ ID NO: 79479 - DNA, 110 bp, synthetic construct
  source 1..110: mol_type = other DNA
tatgagacaaatccagtcaacacaaggaaaagctgccctgcatgaaaggtcccggcatggctcacctccttgcaaaccccgaacgtctgcatccagcctctctcctcagg

SEQ ID NO: 79480 - DNA, 110 bp, synthetic construct
  source 1..110: mol_type = other DNA
tatcatgagaccaagagcaagttgctgaggcagacacccggggaagctaggcagagggcagttccagcctcggctgctggctcggccgccctgcagggcagaggtgccac

SEQ ID NO: 79481 - DNA, 110 bp, synthetic construct
  source 1..110: mol_type = other DNA
cccaccttatgtaaatagatacaccctgctgagattctattttccacacgcttcttctggagctgaaacctcaggcagcacataggctcccttcccagttagcgctttac

SEQ ID NO: 79482 - DNA, 110 bp, synthetic construct
  source 1..110: mol_type = other DNA
tctggagctgaaacctcaggcagcacataggctcccttcccagttagcgctttaccaccaacacacacagggctctccagcctcccaggcttcaccacctgctgcccgac

SEQ ID NO: 79483 - DNA, 110 bp, synthetic construct
  source 1..110: mol_type = other DNA
tctcctgtgttaaagatcaatgggctgcattttgacccccaattctcccatggcccattagtcacagtgaagtgctcttctggtggcctccattcgtgggaagctgtgat

SEQ ID NO: 79484 - DNA, 110 bp, synthetic construct
  source 1..110: mol_type = other DNA
cattagtcacagtgaagtgctcttctggtggcctccattcgtgggaagctgtgattctctgcctccacctccctctccagttagccagcctctgcctgtgaccttggctc

SEQ ID NO: 79485 - DNA, 110 bp, synthetic construct
  source 1..110: mol_type = other DNA
tgggcactggtctcatccattttgtcctttatgtaaattactttccttcagcatcatgtttgtgaacttcagttgtgtttaaatgtgcattcctgatctttgctgttagt

SEQ ID NO: 79486 - DNA, 110 bp, synthetic construct
  source 1..110: mol_type = other DNA
atgtttgtgaacttcagttgtgtttaaatgtgcattcctgatctttgctgttagtgcccttttggtgcaaactccacctttgtctgttgatggacatctcagctttttgt

SEQ ID NO: 79487 - DNA, 110 bp, synthetic construct; identical to SEQ ID NO: 79485
  source 1..110: mol_type = other DNA

SEQ ID NO: 79488 - DNA, 110 bp, synthetic construct; identical to SEQ ID NO: 79486
  source 1..110: mol_type = other DNA

SEQ ID NO: 79489 - DNA, 110 bp, synthetic construct
  source 1..110: mol_type = other DNA
acttcccagacctttcacctaaagctgcccccagcaaaggtgtttacagcctttagttgagtccacaacattcaaaggatcttgtggggtccagctttgatcaatcaatg

SEQ ID NO: 79490 - DNA, 110 bp, synthetic construct
  source 1..110: mol_type = other DNA
gttgagtccacaacattcaaaggatcttgtggggtccagctttgatcaatcaatgtcctcactctggctctttctaagggaataaaaaaaaaaaaatgggggctttttgg

SEQ ID NO: 79491 - DNA, 110 bp, synthetic construct
  source 1..110: mol_type = other DNA
gtataaaacttgttttcatttttactttttccagtatctggtttgcaggagcctcaaagaaacaagaaaaggcaagtgactaaggaatataaatttctcgcacttttgga

SEQ ID NO: 79492 - DNA, 110 bp, synthetic construct
  source 1..110: mol_type = other DNA
gtcctagacttttttttggggggggggttctaattgcagtttcaatattgtacatgtgatcagtcttttcatatgtccattacttcctgatttagtgttggaaaaatttt

SEQ ID NO: 79493 - DNA, 110 bp, synthetic construct
  source 1..110: mol_type = other DNA
ggaggtggtgaggcgcagcatggctcctgtgacccttcctgctaccgtgtaaatctcaggaccattccctatagctggcaacatcaggagctgctccttcagtccctccc

SEQ ID NO: 79494 - DNA, 110 bp, synthetic construct
  source 1..110: mol_type = other DNA
gtactgacatgggatgctgtggagctatggtagactaggtactggttttcaaggccaaggcccagtgggctctggagctagtgtctgttcagtcgtaggttatctgggtc

SEQ ID NO: 79495 - DNA, 110 bp, synthetic construct
  source 1..110: mol_type = other DNA
caaggcccagtgggctctggagctagtgtctgttcagtcgtaggttatctgggtcctagagtctctggctgcatggccttggaagtcttggagttagtgttagcccactt

SEQ ID NO: 79496 - DNA, 110 bp, synthetic construct; identical to SEQ ID NO: 79494
  source 1..110: mol_type = other DNA

SEQ ID NO: 79497 - DNA, 110 bp, synthetic construct; identical to SEQ ID NO: 79495
  source 1..110: mol_type = other DNA

SEQ ID NO: 79498 - DNA, 110 bp, synthetic construct
  source 1..110: mol_type = other DNA
tcctctgtccagctgctgcacttttctccaagtctttgattcctgtcttggttgatttcctcaccagttagttgccttctcaaggtgtggtttcctttcctctttcccag

SEQ ID NO: 79499 - DNA, 110 bp, synthetic construct
  source 1..110: mol_type = other DNA
tttcctcaccagttagttgccttctcaaggtgtggtttcctttcctctttcccagctccctttaaggattgctagtcccatcctgactccttctctctctctcttttttc

SEQ ID NO: 79500 - DNA, 110 bp, synthetic construct
  source 1..110: mol_type = other DNA
ccctcttacctcaaggtgctgtgtaagctgcgtatggtctgcatctgtgactatgacacccactagtttgaccatagatagcctatttgttactggagcagttgtagata

SEQ ID NO: 79501 - DNA, 110 bp, synthetic construct
  source 1..110: mol_type = other DNA
caaattcttgaaagctaaataatatgccaataaacagccagtggataaatgaagaaatcaaagaggaaatcaagatacctaaagacaagtgacaatgaagatatgacaat

SEQ ID NO: 79502 - DNA, 110 bp, synthetic construct; identical to SEQ ID NO: 79501
  source 1..110: mol_type = other DNA

SEQ ID NO: 79503 - DNA, 110 bp, synthetic construct
  source 1..110: mol_type = other DNA
tcttgcttccaggtcaaccatccacatgtaaccctcatctttccagagtggatggactctcgtgactggactccaacatagagatcttctcaggacaattgtgggagttc

SEQ ID NO: 79504 - DNA, 110 bp, synthetic construct
  source 1..110: mol_type = other DNA
actctcgtgactggactccaacatagagatcttctcaggacaattgtgggagttctactagctcccctttccctgtgttcattcttgctatccctcggagctctttctca

SEQ ID NO: 79505 - DNA, 110 bp, synthetic construct
  source 1..110: mol_type = other DNA
tttggatatgactttgatttcttcttcatgccattgcagggatactttgccctgcccagggtcaaagtgatgcttcagatgggcttccagcagctgtcctgggggatggt

SEQ ID NO: 79506 - DNA, 110 bp, synthetic construct
  source 1..110: mol_type = other DNA
ccagggtcaaagtgatgcttcagatgggcttccagcagctgtcctgggggatggtcatcatctgcatctcaggttctctcttcatcccagggctcaggccagtggatggt

SEQ ID NO: 79507 - DNA, 110 bp, synthetic construct
  source 1..110: mol_type = other DNA
tctcacattctcagaaaacactgtcagctcttaccttcaaataaactcagaattcagacctttctcactaccccagctgtactgccctagaacaggccgctgtcatctct

SEQ ID NO: 79508 - DNA, 110 bp, synthetic construct
  source 1..110: mol_type = other DNA
agacctttctcactaccccagctgtactgccctagaacaggccgctgtcatctcttgccaaggacacttgctatcaccccttatttctgcctgctttctgctcttctgca

SEQ ID NO: 79509 - DNA, 110 bp, synthetic construct
  source 1..110: mol_type = other DNA
aggcagtcagatatatgagtctgaatttgaagttcaggggctagaagaatttgggttatctagcatctcagtagcttagatgtacccatgtaccctaaatgctctttctt

SEQ ID NO: 79510 - DNA, 110 bp, synthetic construct
  source 1..110: mol_type = other DNA
acctgctaggggtgtaaccaaaaaaaaatcatgaagttattataaagtctctgcctgcataggaagcaggcccctgttcccgcgagctgaacaaggtctctgagaccaca

SEQ ID NO: 79511 - DNA, 110 bp, synthetic construct
  source 1..110: mol_type = other DNA
tgcataggaagcaggcccctgttcccgcgagctgaacaaggtctctgagaccacagaattctgctccttaccacggaagtaatggggggacctctccagccagaagtttg

SEQ ID NO: 79512 - DNA, 110 bp, synthetic construct
  source 1..110: mol_type = other DNA
atctgtcagctgctgctggaatggagcaggctacttaataaacagcaggagagtcccagtgtgccatctcctcctctctccccggtacacgcccacacagaaactttagc

SEQ ID NO: 79513 - DNA, 110 bp, synthetic construct
  source 1..110: mol_type = other DNA
ccagtgtgccatctcctcctctctccccggtacacgcccacacagaaactttagctggtatgaagtggcagcttggcaagggtactgcatgagccagaccttgccctccc

SEQ ID NO: 79514 - DNA, 110 bp, synthetic construct
  source 1..110: mol_type = other DNA
caaatccatgtcttcaaactccagatgggcattctctctacccctcggcaggcagtacaccaactctctcttattaacatggagaccaagttagtttatcagatgagcta

SEQ ID NO: 79515 - DNA, 110 bp, synthetic construct
  source 1..110: mol_type = other DNA
tacaccaactctctcttattaacatggagaccaagttagtttatcagatgagctagtgctactttgccaagtgcaaagaggccttgaaggaacagggaacagtctgggta

SEQ ID NO: 79516 - DNA, 110 bp, synthetic construct
  source 1..110: mol_type = other DNA
tagtcagattcagtttttgctgaggcatgacgggaagtccctaatgagctcttcttaaacattacctggcagacttacatccctctgtgatcacatcttattccacagaa

SEQ ID NO: 79517 - DNA, 110 bp, synthetic construct
  source 1..110: mol_type = other DNA
catatctactgttctctgtcactccagtgacagccctctaatgatgcaggcagcagcaatgtcatataaattcctccagaaccccaggggctagaaggagatcggattca

SEQ ID NO: 79518 - DNA, 110 bp, synthetic construct
  source 1..110: mol_type = other DNA
gcaatgtcatataaattcctccagaaccccaggggctagaaggagatcggattcaggaagctgggacccaaatgctctgcacagcagagtggagagaacaaagcctttag

SEQ ID NO: 79519 - DNA, 110 bp, synthetic construct
  source 1..110: mol_type = other DNA
agttgccagcacacgagaccagaaggagtcctgggtgtgatgtccgaggatctggatgtgagtcccatgctgaccagctgggcgattctggaccatccactccatcctcc

SEQ ID NO: 79520 - DNA, 110 bp, synthetic construct
  source 1..110: mol_type = other DNA
atgtgagtcccatgctgaccagctgggcgattctggaccatccactccatcctcctggcctcagttcagactgagatcataattgcatccaccacttggtatctgtcacc

SEQ ID NO: 79521 - DNA, 110 bp, synthetic construct
  source 1..110: mol_type = other DNA
agggaaggcaccttcagagtgccggtcaagggatttgcatgtacatgtttggaacacagttttttggaagctagataaagtactcagccttgctctgttgctatcacatt

SEQ ID NO: 79522 - DNA, 110 bp, synthetic construct
  source 1..110: mol_type = other DNA
caaggtcaattgcggaaaacccaaagcagctcttagggttaagtagcttcccacgggcagcaggggtttagtccacactgactgaaagcatcacttctgccttgagggac

SEQ ID NO: 79523 - DNA, 110 bp, synthetic construct
  source 1..110: mol_type = other DNA
cactgccactgatacctctgagggcttctgtgatttaggtctagttgcttcttgagtctccctacttttggtttaggattcaataggtcagttactacttgcctttcccc

SEQ ID NO: 79524 - DNA, 110 bp, synthetic construct
  source 1..110: mol_type = other DNA
gtctccctacttttggtttaggattcaataggtcagttactacttgcctttccccttttcatcttctgctttcgttctttcaattgtttctcagcttatacctaaaaaat

SEQ ID NO: 79525 - DNA, 110 bp, synthetic construct
  source 1..110: mol_type = other DNA
gtcagattcattaccgctgaaccacgacgggaactccctgactattcagtttttcaagctgaggggctggaatcctgcagccccacctacttcggcctgggagtttttct

SEQ ID NO: 79526 - DNA, 110 bp, synthetic construct; identical to SEQ ID NO: 79525
  source 1..110: mol_type = other DNA

SEQ ID NO: 79527 - DNA, 110 bp, synthetic construct
  source 1..110: mol_type = other DNA
taagtgtttcaatttttcattcttttgcaaaattgttttagctgttctaggtccttggcttgtccatgtacattttagaaatagttcatcagttttgtgcaagcatctgc

SEQ ID NO: 79528 - DNA, 110 bp, synthetic construct
  source 1..110: mol_type = other DNA
tgtctactttaaggtatacctgccaaaaatgtagaaatagtttatatgccctgtaatgatttatactgcctaggagttatctattacttgaatgttagattaaatttgtc

SEQ ID NO: 79529 - DNA, 110 bp, synthetic construct
  source 1..110: mol_type = other DNA
gtttactcagaggcttgactcttgagttctatttcctttcaggaccttaggaaactcacagtcaatactcttcccttgaactcagtcactaagatgatcccaaggtaaag

SEQ ID NO: 79530 - DNA, 110 bp, synthetic construct
  source 1..110: mol_type = other DNA
ctcaggccagggattgaacccaagccatagcatccacccaagctgctgccacaggagaactttgtctacctcctcttgatgccggaaagatgttaccggaattcgggttc

SEQ ID NO: 79531 - DNA, 110 bp, synthetic construct
  source 1..110: mol_type = other DNA
gaacgcgccctcggaaaacagggctaaacttcaggacctgagctcagagaagcatagctggcagttgtacatttcactgagcaataacggcctatttccttaatggggga

SEQ ID NO: 79532 - DNA, 110 bp, synthetic construct
  source 1..110: mol_type = other DNA
ttaactgtttttcccccttgttaatttgtaagttccaccatacttttcaatcttgagcacttataatgagacatctacttcttttctattctttgacagtgtgacaccta

SEQ ID NO: 79533 - DNA, 110 bp, synthetic construct
  source 1..110: mol_type = other DNA
agcacttataatgagacatctacttcttttctattctttgacagtgtgacacctagtgttgctcccactagaagccttagtttctcactgcccctccccaagaggagaag

SEQ ID NO: 79534 - DNA, 110 bp, synthetic construct
  source 1..110: mol_type = other DNA
ggatggaagtaggatatatgagcagtaatcctgtcactgcttctcctaggtgacgtttcaaaatcgactgaaacacttgttcatagtattcagcaatatcttttttttcc

SEQ ID NO: 79535 - DNA, 110 bp, synthetic construct
  source 1..110: mol_type = other DNA
tttcaaaatcgactgaaacacttgttcatagtattcagcaatatcttttttttccatgtttgctgttatcttggccacgaggaatatcctatgaagaaggaatttcttta

SEQ ID NO: 79536 - DNA, 110 bp, synthetic construct
  source 1..110: mol_type = other DNA
tccttctaggaaattctacaggtctagtctttcatctcctttcctgattgatatccattttggggaatattaatacccaaggtcaagcttcaaataaaatttatcaaaga

SEQ ID NO: 79537 - DNA, 110 bp, synthetic construct
  source 1..110: mol_type = other DNA
agtaagaggaaaaccaggataatgcatttcttgttcatatcatcattggccacaggaattactgtagaaagagcacgcgtgtgctactaataggaagaatttaccatagt

SEQ ID NO: 79538 - DNA, 110 bp, synthetic construct
  source 1..110: mol_type = other DNA
attatactatcactttactattatcactttatatttgggtagcactttataaatttcatatacacagagctgctttgcattttttcaatcctctcaaaatctctgtgggg

SEQ ID NO: 79539 - DNA, 110 bp, synthetic construct
  source 1..110: mol_type = other DNA
tcatatacacagagctgctttgcattttttcaatcctctcaaaatctctgtggggaagagagagtaaatgataaacatatttcataaagaagcaatggctaaaactttcc

SEQ ID NO: 79540 - DNA, 110 bp, synthetic construct
  source 1..110: mol_type = other DNA
atctgctttaaaagagtgtcagcagttttgatatctgccacgttttactcgctgtaggttcaggatccccacagaaataagctacaaataaaagctaaagagaattagga

SEQ ID NO: 79541 - DNA, 110 bp, synthetic construct
  source 1..110: mol_type = other DNA
tgtgtgagcaagaaagaggagaataagggctgaaggtttttagaagagaaaatgagactaattacattccagtgactatagctaataactgtggaacaccacacaaagtc

SEQ ID NO: 79542 - DNA, 110 bp, synthetic construct
  source 1..110: mol_type = other DNA
ttcactctttctcagtgcagtccacatgctctgatggaagataacctcttccccagctacaggggtagactctggatctaaccatacctgaagctctctctttcaatttg

SEQ ID NO: 79543 - DNA, 110 bp, synthetic construct
  source 1..110: mol_type = other DNA
acgttgttaaaacatctagaagtttatttatatttggtgataggtgcagagaaccagctcagcaggtgagggttaaagaacaggtgctgtaacacttaagaaaagattaa

SEQ ID NO: 79544 - DNA, 110 bp, synthetic construct
  source 1..110: mol_type = other DNA
tttagtttgtcatgtatacggttgtagttggagtatgtggttgcatcctttcctaacatggatttccttatcttctttaatatgctatcctatttgaatagcttctggat

SEQ ID NO: 79545 - DNA, 110 bp, synthetic construct
  source 1..110: mol_type = other DNA
acatggatttccttatcttctttaatatgctatcctatttgaatagcttctggattagcatgaggattatatattttcaccaattagtaaaggtattagtagaagagccc

SEQ ID NO: 79546 - DNA, 110 bp, synthetic construct; identical to SEQ ID NO: 79544
  source 1..110: mol_type = other DNA

SEQ ID NO: 79547 - DNA, 110 bp, synthetic construct; identical to SEQ ID NO: 79545
  source 1..110: mol_type = other DNA

SEQ ID NO: 79548 - DNA, 110 bp, synthetic construct
  source 1..110: mol_type = other DNA
tggaaagactgaagtggtagaagatattctttcatatcatattttagttggctttcacaagttcatctagcttttgccattattctacttaattagaaagaaacaagtca

SEQ ID NO: 79549 - DNA, 110 bp, synthetic construct
  source 1..110: mol_type = other DNA
caagctcttcaaagtatgaattgcaagctcttcaaagtatgaattgcgagagcatattggtcttctccaagggtcttctgtggacaaatgaggataattggagaatgttc

SEQ ID NO: 79550 - DNA, 110 bp, synthetic construct
  source 1..110: mol_type = other DNA
gttccatttctgtgctttcccagtggcagttgacaccctccagaaagctgagacgccggctcattaaagggtccaggcattaggggatcacttacctaccatccttttgc

SEQ ID NO: 79551 - DNA, 110 bp, synthetic construct
  source 1..110: mol_type = other DNA
gcttcaaataagagaaattggacaccacattattcaaaataaactgtaatttgtagagggagctgagaaaggttattttgagaagtatttggtatgctgagcatgggtcc

SEQ ID NO: 79552 - DNA, 110 bp, synthetic construct
  source 1..110: mol_type = other DNA
ctaatagatataaaatgttagaacagagcctggcacataataactgatagttattttcatcttcctaagcttcatcataaacagagaaactatgacaatctgtgaagctg

SEQ ID NO: 79553 - DNA, 110 bp, synthetic construct
  source 1..110: mol_type = other DNA
accttatggttcttagtcggattcattacccactgagccacatgggaactcttattttatatttatttataacaccaatcaacgtgttaggagctatttggtgcacttta

SEQ ID NO: 79554 - DNA, 110 bp, synthetic construct
  source 1..110: mol_type = other DNA
tttatatttatttataacaccaatcaacgtgttaggagctatttggtgcactttacattaagttctcacaatctactgtgagagaggtactcttattattcattttcctg

SEQ ID NO: 79555 - DNA, 110 bp, synthetic construct
  source 1..110: mol_type = other DNA
atgttgctccacagcttgcatgaatctgtcctaaaagcattttctaagtctgaatttccctttgttaggttggtctatctgccttttatgtttcaggataagccacggat

SEQ ID NO: 79556 - DNA, 110 bp, synthetic construct
  source 1..110: mol_type = other DNA
ttccctttgttaggttggtctatctgccttttatgtttcaggataagccacggatccctcctccagtcttgcctcagcacctgttcaggcattctgcacacacctgggca

SEQ ID NO: 79557 - DNA, 110 bp, synthetic construct
  source 1..110: mol_type = other DNA
tgtgttggcatttcataatgatagaaacctgttttcatggcattagcaactgtgttggtaataatccaggctgggaagccactggtattggttatgttggtcttcgacat

SEQ ID NO: 79558 - DNA, 110 bp, synthetic construct
  source 1..110: mol_type = other DNA
aatttctgagcacccgacctacatatagtctttctacctttagccaaggacaggtatgatttactacattattgggttacatctctacttcaggattcagtcaaagtggc

SEQ ID NO: 79559 - DNA, 110 bp, synthetic construct
  source 1..110: mol_type = other DNA
atgatttactacattattgggttacatctctacttcaggattcagtcaaagtggcacagttttcccatttagatttagaaagttgaattaacttgcttgttctgtcaata

SEQ ID NO: 79560 - DNA, 110 bp, synthetic construct
  source 1..110: mol_type = other DNA
tcacttgcccagatctttataatgtgttgtcctatctgctatagtgtccttggatagatttcacaagatcatacactaaagaactgggatatgtttttaaagaattgttg

SEQ ID NO: 79561 - DNA, 110 bp, synthetic construct
  source 1..110: mol_type = other DNA
gaattagaataaagcccttataaaaaaatcttcaagtggcatatattgatgagtactgcaggctccaaagtagagctcagtttggccaggaaatctgtccaacaaatatt

SEQ ID NO: 79562 - DNA, 110 bp, synthetic construct
  source 1..110: mol_type = other DNA
ctgcaggctccaaagtagagctcagtttggccaggaaatctgtccaacaaatatttaggtgtcatggctttcacagatgctcagaaggcagtagatggtgatgacaataa

SEQ ID NO: 79563 - DNA, 110 bp, synthetic construct
  source 1..110: mol_type = other DNA
aggaacatgttgagtatttgctgagtactaactatgtctcctatgaatgtacggaatgatttcatttcatggaaaatgagagctgaaaaaagattttagagaacatctag

SEQ ID NO: 79564 - DNA, 110 bp, synthetic construct
  source 1..110: mol_type = other DNA
agtccttatctagatgtgaggatatattggtgaacaaaataaacacatgtctgttctcagtaaagctgacagtatagttgtggcttaactcttagatgtaaaaccatact

SEQ ID NO: 79565 - DNA, 110 bp, synthetic construct
  source 1..110: mol_type = other DNA
cttcttagtactcatcttatactatctaccactcattcctgcagcacccccgtctctccctcagcacctcttgcaaatgattctttggcatggacctcaagcttgccctt

SEQ ID NO: 79566 - DNA, 110 bp, synthetic construct
  source 1..110: mol_type = other DNA
ctccctcagcacctcttgcaaatgattctttggcatggacctcaagcttgccctttcagttccagccctaaattccagttgccagcttaaccttcatgtcatctccagag

SEQ ID NO: 79567 - DNA, 110 bp, synthetic construct
  source 1..110: mol_type = other DNA
ctgagctctggggagatgggctcagagtcttcctattctgtcatcttgatccagcctcaatgtgcatattcttttaaagcatgaatggaatgatctcaaaatgtgactat

SEQ ID NO: 79568 - DNA, 110 bp, synthetic construct
  source 1..110: mol_type = other DNA
ttctgtcatcttgatccagcctcaatgtgcatattcttttaaagcatgaatggaatgatctcaaaatgtgactatgtcataaaagaagaaattcctcaaaaaactaaaaa

SEQ ID NO: 79569 - DNA, 110 bp, synthetic construct
  source 1..110: mol_type = other DNA
aaaatagtgctgccttgtgacttagctttttattaccttcagtatttttctaatcccatctcctgaggactctggccctggtccaaaggtagaaggatcagatacaatga

SEQ ID NO: 79570 - DNA, 110 bp, synthetic construct
  source 1..110: mol_type = other DNA
aatatttattaattacttaacatgttttatgtactgccccgacattgataattcatagtgttaaaaaaaaaattcacagagttccctggtggcctagctataagggtggc

SEQ ID NO: 79571 - DNA, 110 bp, synthetic construct; identical to SEQ ID NO: 79570
  source 1..110: mol_type = other DNA

SEQ ID NO: 79572 - DNA, 110 bp, synthetic construct
  source 1..110: mol_type = other DNA
cctagagctgctccagtcccaggcagagcctctgactgtggtaactccagacaagtcttcctctccctgttggctactcaccaacttcccattcagttatcactgagctt

SEQ ID NO: 79573 - DNA, 110 bp, synthetic construct
  source 1..110: mol_type = other DNA
tcttcctctccctgttggctactcaccaacttcccattcagttatcactgagcttgatcctcgccaaaatcccagggatcctctctctgctttgattcttagaggatttc

SEQ ID NO: 79574 - DNA, 110 bp, synthetic construct
  source 1..110: mol_type = other DNA
aataattttgatagaattgtgaatctagtgagcctcttgcctatatccttaggaatggcacctgaggttgatgtctaaagagcttgtgaccagacatttgttttatttta

SEQ ID NO: 79575 - DNA, 110 bp, synthetic construct
  source 1..110: mol_type = other DNA
cgggtgcggccctagaaaaggcaaaaagacaaaaaatttaaaaaaggagctcagtaaagggtctcacacccctaagacctctccaactttttgcacaccaaccataattt

SEQ ID NO: 79576 - DNA, 110 bp, synthetic construct
  source 1..110: mol_type = other DNA
tacagggaatagagatgaatgaactttagctttactctttaagaactgacaacgtgggtaaactagtgtttaccaactgacagtagataccaggtgccatgaagattatg

SEQ ID NO: 79577 - DNA, 110 bp, synthetic construct
  source 1..110: mol_type = other DNA
aaaacaaaaacagtaatggcttatagcaaataacttaagaaggaagtagctaaaattaaagcattctgaggtccttgttttatgaaggaggatggtaaaatcactaacct

SEQ ID NO: 79578 - DNA, 110 bp, synthetic construct
  source 1..110: mol_type = other DNA
tttcagatgttcaacaggatgattcaatagttttatatatttggcctttggggagctttatttttaaagacaacctcagagggcactcggtgagaaagtgatggctacaa

SEQ ID NO: 79579 - DNA, 110 bp, synthetic construct
  source 1..110: mol_type = other DNA
ggaaatatacattctacaagtaataacagtaggaatcatggaattaaaaatgttataggtgctacaaagaaaaataatgacagaagaagatgctgctgataacagggaat

SEQ ID NO: 79580 - DNA, 110 bp, synthetic construct
  source 1..110: mol_type = other DNA
gacagaattagagagaaatcatggcactccaacagcctcagcagctcaacgcaaatcgtcactgagcacacagcagtagtgagtactcgctcagtctcagtggtagaata

SEQ ID NO: 79581 - DNA, 110 bp, synthetic construct
  source 1..110: mol_type = other DNA
gaagtaaaggtgttaatgagacaacctagtccatgaaaactgtatagatcatagcaatgtgccagacacaaaagtcatcaagaaatggttgatgcgtttgttaatattgg

SEQ ID NO: 79582 - DNA, 110 bp, synthetic construct
  source 1..110: mol_type = other DNA
cattcattaagtataaaatgattcccaagctggtaaaaacaggaatacctcgcggggaactgtttgaagtttgaggctttcctgactttacttctgtgttctcacgtgcc

SEQ ID NO: 79583 - DNA, 110 bp, synthetic construct
  source 1..110: mol_type = other DNA
atgccccactattcattaatacattattttgaaagacagaagagtttcttgagtgattataagagctttcagaaatgtctttgagcaagactgtgagtgagtcctgggaa

SEQ ID NO: 79584 - DNA, 110 bp, synthetic construct
  source 1..110: mol_type = other DNA
attataagagctttcagaaatgtctttgagcaagactgtgagtgagtcctgggaatcacaacctttactacttttagttgtggagtgtagatgaagtgctggccatcagg

SEQ ID NO: 79585 - DNA, 110 bp, synthetic construct; identical to SEQ ID NO: 79583
  source 1..110: mol_type = other DNA

SEQ ID NO: 79586 - DNA, 110 bp, synthetic construct; identical to SEQ ID NO: 79584
  source 1..110: mol_type = other DNA

SEQ ID NO: 79587 - DNA, 110 bp, synthetic construct
  source 1..110: mol_type = other DNA
ccctgtaaatagggacctgactatttaggcactgccactctgaatattataaaaacgtattattctgagctgttacagaaagcaacgtaaattggtagaagtagatatta

SEQ ID NO: 79588 - DNA, 110 bp, synthetic construct
  source 1..110: mol_type = other DNA
actctcattttctatatttttatacacactttaactttctaggtaattcatgatttaatgtcaagaatggttattgtggtgggagggaatttgtagaggaagagaagtta

SEQ ID NO: 79589 - DNA, 110 bp, synthetic construct
  source 1..110: mol_type = other DNA
taatgtcaagaatggttattgtggtgggagggaatttgtagaggaagagaagttaactggtcatttccactttttcttgaaaacctcctttgttttctgagttttatgta

SEQ ID NO: 79590 - DNA, 110 bp, synthetic construct
  source 1..110: mol_type = other DNA
acgttgagcgcccaggtggccccgggttttctctccttgagttttctttactcgctgccggtgtttcaactttaacctttcctagagtaggcaggctgcgtcctgagttt

SEQ ID NO: 79591 - DNA, 110 bp, synthetic construct
  source 1..110: mol_type = other DNA
tgccggtgtttcaactttaacctttcctagagtaggcaggctgcgtcctgagttttgtttatgtagtttttaaaaggcgccgacttctctcgctcagatcatgacccatt

SEQ ID NO: 79592 - DNA, 110 bp, synthetic construct
  source 1..110: mol_type = other DNA
gtcttttctgacttgtgtgagcagtgcagtgggatcttgggtgggagaagcaccgcacagtaagataaaagagctcatccaggagacttactttggaaagaagattggct

SEQ ID NO: 79593 - DNA, 110 bp, synthetic construct
  source 1..110: mol_type = other DNA
aaattactgtctgtcatagtactgtagctagcacaaacgcaagtgatgtttccagagggcaatttaagatcacatcataaaccactacaattatttcacacaggatagtt

SEQ ID NO: 79594 - DNA, 110 bp, synthetic construct
  source 1..110: mol_type = other DNA
gagtaacatctttccggcatcaacagtatttgctttataccatattcattagctctatccactcatctactcaagtacagatacagagaaagaagggaatgtgcttcctg

SEQ ID NO: 79595 - DNA, 110 bp, synthetic construct
  source 1..110: mol_type = other DNA
tatccactcatctactcaagtacagatacagagaaagaagggaatgtgcttcctgtgaaatggaggccacatccaaagaaacattcaatcttgtctatagatcatcacgt

SEQ ID NO: 79596 - DNA, 110 bp, synthetic construct
  source 1..110: mol_type = other DNA
aatttggttgcttctcaacaccatcttggccaacaccatggtctgcctagtcaaaactgaccctttaggtcttaccttggctatagaaacagcctagtaactcattattc

SEQ ID NO: 79597 - DNA, 110 bp, synthetic construct
  source 1..110: mol_type = other DNA
actgaccctttaggtcttaccttggctatagaaacagcctagtaactcattattctctttatccttagacacctgtggttaccaacacagtaaccaaaatgatgctgtta

SEQ ID NO: 79598 - DNA, 110 bp, synthetic construct
  source 1..110: mol_type = other DNA
attgtgagcttcagattccttatccttaaaatggacttaataccacctgctttcttgagctgttttaaggaataaacaaaatgcatatgtaaatcacattgtactattca

SEQ ID NO: 79599 - DNA, 110 bp, synthetic construct
  source 1..110: mol_type = other DNA
ttccttatccttaaaatggacttaataccacctgctttcttgagctgttttaaggaataaacaaaatgcatatgtaaatcacattgtactattcagaggtcaccattaat

SEQ ID NO: 79600 - DNA, 110 bp, synthetic construct
  source 1..110: mol_type = other DNA
atacaaaggaccactgcaagcattttgggacagtagtgattgaatgcagatttcgggattgttttgctagaccacattattctttcaaatgtttcttcggtagttgcata

SEQ ID NO: 79601 - DNA, 110 bp, synthetic construct
  source 1..110: mol_type = other DNA
ggattgttttgctagaccacattattctttcaaatgtttcttcggtagttgcatattactttctaatgataatcatttgcattttcaaagccccttttgcccctgatgtt

SEQ ID NO: 79602 - DNA, 110 bp, synthetic construct
  source 1..110: mol_type = other DNA
aatattgtaaagattttccctatactcactggtgaattttcattggtttggaagaatgggaaaagctcatagggacaaggtagaaaagagtttatgtattatgattccta

SEQ ID NO: 79603 - DNA, 110 bp, synthetic construct
  source 1..110: mol_type = other DNA
ctccttcaacagcaataggcatccatccacatacaagtgcctttgagggagctgtgggatataccaccttatgccaaagggcctgagaggacccacccaagcattaggta

SEQ ID NO: 79604 - DNA, 110 bp, synthetic construct
  source 1..110: mol_type = other DNA
aaagccttccagaagattctatcatgcaaccaagactgagaaccactggagaaatgatatcagcttaattaatatcttttcacttcagcttatttatcttcctcacatca

SEQ ID NO: 79605 - DNA, 110 bp, synthetic construct
  source 1..110: mol_type = other DNA
gttacatattttgatgaacacattcatctaccaatggctatggtgagagctaccataacagaaaaagctaagaaacaaattcttttaagaacacattattttggagttcc

SEQ ID NO: 79606 - DNA, 110 bp, synthetic construct
  source 1..110: mol_type = other DNA
atctaccaatggctatggtgagagctaccataacagaaaaagctaagaaacaaattcttttaagaacacattattttggagttcccgtcgtggctcaggggttaatgaat

SEQ ID NO: 79607 - DNA, 110 bp, synthetic construct; identical to SEQ ID NO: 79605
  source 1..110: mol_type = other DNA

SEQ ID NO: 79608 - DNA, 110 bp, synthetic construct; identical to SEQ ID NO: 79606
  source 1..110: mol_type = other DNA

SEQ ID NO: 79609 - DNA, 110 bp, synthetic construct
  source 1..110: mol_type = other DNA
ctgtgaactgtggtgtaggtcacagacgtggcacagaccttgtgttgttgcagctgtggtataggctgtagctccgatttgacccctggcctgagaacctccatatgcta

SEQ ID NO: 79610 - DNA, 110 bp, synthetic construct; identical to SEQ ID NO: 79609
  source 1..110: mol_type = other DNA

SEQ ID NO: 79611 - DNA, 110 bp, synthetic construct
  source 1..110: mol_type = other DNA
tctttcattacttttctctaagagtatagtgatgtcccatggagcttcacttgacaaaaatgtatcacatactgagttcctctcattccttttctcatcagcttggacca

SEQ ID NO: 79612 - DNA, 110 bp, synthetic construct
  source 1..110: mol_type = other DNA
aaaaatgtatcacatactgagttcctctcattccttttctcatcagcttggaccaattgaataggtgaaacagtgttcatgcaacttgatgcctaatgtggggcccccaa

SEQ ID NO: 79613 - DNA, 110 bp, synthetic construct
  source 1..110: mol_type = other DNA
cttattaaatttagctgtggaaagagtggcactttgaaaacacttcaaactaactttagtagggtcacatttttttgcttttccagtaagttattcaagcatccacctgc

SEQ ID NO: 79614 - DNA, 110 bp, synthetic construct; identical to SEQ ID NO: 79613
  source 1..110: mol_type = other DNA

SEQ ID NO: 79615 - DNA, 110 bp, synthetic construct
  source 1..110: mol_type = other DNA
agatgatgttcaactcaaagttcagagcatatgggcagactggtttactgaccggcttcatggtagggtgagcaataagggtaaaagacttttaggctggggaggggaca

SEQ ID NO: 79616 - DNA, 110 bp, synthetic construct
  source 1..110: mol_type = other DNA
atctaagtccatgtgacaaaaggactctcctgatgctctaagttcattcactgggtcacattaaattacgtattctgaagaattgtttaggatatactgtttctcaactg

SEQ ID NO: 79617 - DNA, 110 bp, synthetic construct
  source 1..110: mol_type = other DNA
tcacattaaattacgtattctgaagaattgtttaggatatactgtttctcaactgtgttcatcttcataaagttccatgaaaaccagaaaataaaagttcctgatcttgg

SEQ ID NO: 79618 - DNA, 110 bp, synthetic construct
  source 1..110: mol_type = other DNA
ccaagattttctatgtattttctcaccacttccactgttctgattccagcatcatctcttgcagagcttgttaggcagtttttgaaatggctggcaatgactccctcctc

SEQ ID NO: 79619 - DNA, 110 bp, synthetic construct
  source 1..110: mol_type = other DNA
gaaaggtttacaaaaaaactgtcctgatattttctgaagctaagagggcgcaggcgaactccaggcattagtgtctgctgctggcactggactagcaggagggtaggtgt

SEQ ID NO: 79620 - DNA, 110 bp, synthetic construct
  source 1..110: mol_type = other DNA
tcctccatttcttctaattttctgtgagcactcagagcaaccaagaatcaaggattaggattgaataataaaatggcaaacttgcattcccgtaatcatttctactattg

SEQ ID NO: 79621 - DNA, 110 bp, synthetic construct
  source 1..110: mol_type = other DNA
agcaaccaagaatcaaggattaggattgaataataaaatggcaaacttgcattcccgtaatcatttctactattgtaatttaattcttaatctccttaacttccattgct

SEQ ID NO: 79622 - DNA, 110 bp, synthetic construct
  source 1..110: mol_type = other DNA
tgccagcttcatagcctccttccttctttcactcccctttctttaagaaaaacttagaggagaacaggttattagataattcaggatctttggaatgagagaatgcagta

SEQ ID NO: 79623 - DNA, 110 bp, synthetic construct
  source 1..110: mol_type = other DNA
agaggagaacaggttattagataattcaggatctttggaatgagagaatgcagtaggggaaggggacagaaactatcttttatgtaacatttaaagaatctgttgattat

SEQ ID NO: 79624 - DNA, 110 bp, synthetic construct; identical to SEQ ID NO: 79622
  source 1..110: mol_type = other DNA

SEQ ID NO: 79625 - DNA, 110 bp, synthetic construct; identical to SEQ ID NO: 79623
  source 1..110: mol_type = other DNA

SEQ ID NO: 79626 - DNA, 110 bp, synthetic construct
  source 1..110: mol_type = other DNA
ctcataaattgttgtcaccagataccatacaactcagggggagatgaatgtatgcccagctccagggttgctgttcttagtctaaggctaaacttgtcaactcgcttaat

SEQ ID NO: 79627 - DNA, 110 bp, synthetic construct
  source 1..110: mol_type = other DNA
taggcccctgtcctgcccactagctctctggctttgggacacacagccccattctcagctatcaagaaccccacccccactccgccatgcccagcaatctgacaccagct

SEQ ID NO: 79628 - DNA, 110 bp, synthetic construct
  source 1..110: mol_type = other DNA
cagctatcaagaaccccacccccactccgccatgcccagcaatctgacaccagctctggaatccctgtgtcctgtagccgtactctaggaccccattccgcctggcaata

SEQ ID NO: 79629 - DNA, 110 bp, synthetic construct
  source 1..110: mol_type = other DNA
tgtttttttcatctttaattaactgtgtgtcagagacttctttctttcattaagcctgaaggcttgatccctgttggatctacccattagctgcattttaagacaaggac

SEQ ID NO: 79630 - DNA, 110 bp, synthetic construct
  source 1..110: mol_type = other DNA
ctgaaggcttgatccctgttggatctacccattagctgcattttaagacaaggacagcattaaccctgtgttgtctctagggctctggtttctcagccatcttcatgatc

SEQ ID NO: 79631 - DNA, 110 bp, synthetic construct
  source 1..110: mol_type = other DNA
ttttactctgctgttcattatttcttgatggtaatactaactttagcaatttccctctcctcctttaagaaaattcccactgactgataaatcataaaaatcaggcttat

SEQ ID NO: 79632 - DNA, 110 bp, synthetic construct
  source 1..110: mol_type = other DNA
tctggcaagaattcccaggcatgggttagtggttcctgcccacatggagattcatccttcaactttacagaaaggggcacgattggtagtgggaagagtggttcatcttt

SEQ ID NO: 79633 - DNA, 110 bp, synthetic construct
  source 1..110: mol_type = other DNA
ccttcaactttacagaaaggggcacgattggtagtgggaagagtggttcatctttgcttgagctgaaactttcaagggtgaaccgcacccctgaggccattctggtggtg

SEQ ID NO: 79634 - DNA, 110 bp, synthetic construct
  source 1..110: mol_type = other DNA
cataatggcataatacccttgcctcaaatcttcagagaggcaaaatgatcaccgattaagcaagttcaactgcacgcaatgttttcataagcacaggaatattactccat

SEQ ID NO: 79635 - DNA, 110 bp, synthetic construct
  source 1..110: mol_type = other DNA
gtcttttaagcctcaaagaagtctatgagttaggtgttaagttatccatagagaagaaagcaaagcagctcagccaagttcggtgacatgctcagtttcaaacacccagt

SEQ ID NO: 79636 - DNA, 110 bp, synthetic construct
  source 1..110: mol_type = other DNA
taccccttcactagttaaggcacattgtttccagtttggggctattaaaaataaagctgctgtgaacattctgtacagtcttcctgtgaatgtgtatcttttctttcggg

SEQ ID NO: 79637 - DNA, 110 bp, synthetic construct
  source 1..110: mol_type = other DNA
gctgctgtgaacattctgtacagtcttcctgtgaatgtgtatcttttctttcggggaactatctgtgaatggaattgctaagtcacatggtacatggacgtttgacctga

SEQ ID NO: 79638 - DNA, 110 bp, synthetic construct
  source 1..110: mol_type = other DNA
ccccattttctcccacgaatatttctcctcataaatttcttgcatgtatatcctctcttggcctctccccaaggtattacaacgaacgcacgcgtcttggtagttttaag

SEQ ID NO: 79639 - DNA, 110 bp, synthetic construct
  source 1..110: mol_type = other DNA
tcttggcctctccccaaggtattacaacgaacgcacgcgtcttggtagttttaagtctcctacttagctaccgtaggaattcaaacattgcagtcactggctataacaga

SEQ ID NO: 79640 - DNA, 110 bp, synthetic construct
  source 1..110: mol_type = other DNA
gatggacatccagaagggcagcctccagacagagaccagaagaaaaagagaatacatgggctgcacaggggataattagctcagctgccagggacccttcatgcttcaaa

SEQ ID NO: 79641 - DNA, 110 bp, synthetic construct
  source 1..110: mol_type = other DNA
acaggaactctgacctaaagctgtccttaagagagatttacctgagagcagaagcatatctccctgcagctctccacaatcacgctgcacaatgaggcatttaccttgct

SEQ ID NO: 79642 - DNA, 110 bp, synthetic construct
  source 1..110: mol_type = other DNA
atatctccctgcagctctccacaatcacgctgcacaatgaggcatttaccttgctgctttgttcaaggtagactggaaatctaccaatgcaaatcaaactttctcacttc

SEQ ID NO: 79643 - DNA, 110 bp, synthetic construct
  source 1..110: mol_type = other DNA
tctggcaataggccctgaaggattatgggaagttccatacaaagcgtcaagtctttcaaggagctcatcatcaagatgaagatgaacaagaatagaatcatatgctaatg

SEQ ID NO: 79644 - DNA, 110 bp, synthetic construct
  source 1..110: mol_type = other DNA
gagccaactatgctaatgaagcttaaaaatgaataggttgagtctcggaaactgaaatatgatcatataattgaaggtagcctgaaacatcacaaaactggaccaagatg

SEQ ID NO: 79645 - DNA, 110 bp, synthetic construct
  source 1..110: mol_type = other DNA
atatctttttccacccattttcaagaattgcactgtaaaataaacccgggcctcagttggctagttttggaatcccagatatttagactgcagacattactaaggcaaat

SEQ ID NO: 79646 - DNA, 110 bp, synthetic construct
  source 1..110: mol_type = other DNA
catttcaaggaagacactactaggtagaggaaatcacgacagtgagggcctttgggagggagcttgcttggcaggttcaaggtacaaggcggcagtgcggctggagtgga

SEQ ID NO: 79647 - DNA, 110 bp, synthetic construct
  source 1..110: mol_type = other DNA
cacaccccagaggtaactgttttggatatgtttatattcatctaaaaaaggtcgtattttactttcagatgattcgttggcatggagatgtacttagagacttttaagtt

SEQ ID NO: 79648 - DNA, 110 bp, synthetic construct
  source 1..110: mol_type = other DNA
ttttgcctggggtgaggggaatgacttacttgtcagttaagtaaaatttggagttattttttggaagctgttaggatgcagaaatttttgttttgtcaaatgtgtctata

SEQ ID NO: 79649 - DNA, 110 bp, synthetic construct
  source 1..110: mol_type = other DNA
tcagaggaaactgtacacgaaagatgaaatctaccagtcgtttacccagctcctttttcccttctagatcgctaagcttttcgtgatactttgccagatgcttccctgga

SEQ ID NO: 79650 - DNA, 110 bp, synthetic construct
  source 1..110: mol_type = other DNA
tttcccttctagatcgctaagcttttcgtgatactttgccagatgcttccctggatactgggccttagagagcaggttccaggcaggtaagccatgccttgggaaaatac

SEQ ID NO: 79651 - DNA, 110 bp, synthetic construct
  source 1..110: mol_type = other DNA
gctcattgtgctgacctcacgaataaaatatgagggcacaatgacccatgaaattgacccccttgctcaagagacatcctgactttgctgctggtgctgactttcccaag

SEQ ID NO: 79652 - DNA, 110 bp, synthetic construct
  source 1..110: mol_type = other DNA
gacccccttgctcaagagacatcctgactttgctgctggtgctgactttcccaagactacgagaccccccccccctaccatgggacattacacacctacagatttctcag

SEQ ID NO: 79653 - DNA, 110 bp, synthetic construct
  source 1..110: mol_type = other DNA
ccctgtcttattccgatgctattgtttcctcttctaactttgaatcatattttgtatgaatccagattcataccttttttttcttttgtctgtttcttcagaacccctat

SEQ ID NO: 79654 - DNA, 110 bp, synthetic construct; identical to SEQ ID NO: 79653
  source 1..110: mol_type = other DNA

SEQ ID NO: 79655 - DNA, 110 bp, synthetic construct
  source 1..110: mol_type = other DNA
tgtcctcttgtttactcgagtcttcttctatgttatcctctcctttttcccgatgctttcataaaaaatatttcagagctcaatcttggtcctcctcaagccacagttaa

SEQ ID NO: 79656 - DNA, 110 bp, synthetic construct
  source 1..110: mol_type = other DNA
ctttcttacattctgcataaattacagttgtttgtatacatgtttcttttcaatatgctgttattattcccttgagtaaaggaccacataatactgaccagctacagcca

SEQ ID NO: 79657 - DNA, 110 bp, synthetic construct; identical to SEQ ID NO: 79656
  source 1..110: mol_type = other DNA

SEQ ID NO: 79658 - DNA, 110 bp, synthetic construct
  source 1..110: mol_type = other DNA
aaaaataggttttatcagcttctctgtcccatatgacattttgaagtgaaattgcttacagctcttttaaatagaagagaatcgcatttggtgacatttgctaatagcat

SEQ ID NO: 79659 - DNA, 110 bp, synthetic construct
  source 1..110: mol_type = other DNA
gtgaaattgcttacagctcttttaaatagaagagaatcgcatttggtgacatttgctaatagcatggtctatagtgcttatgtttataattttgatgaagtttgttgatt

SEQ ID NO: 79660 - DNA, 110 bp, synthetic construct
  source 1..110: mol_type = other DNA
gaccaatttgtagtcgccacacagtcttcagggtttattttagaggaaattgttccataagtagtggtagacgcactgtgtctgtgggatgaggtgagcttgggatcttc

SEQ ID NO: 79661 - DNA, 110 bp, synthetic construct
  source 1..110: mol_type = other DNA
cataagtagtggtagacgcactgtgtctgtgggatgaggtgagcttgggatcttcctatgtcaccatctcgaaccagaacctccttttctgttgtaattgagaattttca

SEQ ID NO: 79662 - DNA, 110 bp, synthetic construct
  source 1..110: mol_type = other DNA
gcttctactactgtagtcactgtgaggcaggatgtctttccctgctggttcctctctgccctcccccatttttgttttcttcggatggtgagaagagctggttcaagttg

SEQ ID NO: 79663 - DNA, 110 bp, synthetic construct
  source 1..110: mol_type = other DNA
ctgccctcccccatttttgttttcttcggatggtgagaagagctggttcaagttgtcatggtttaggtgctaccaacggtattcctttctcccaacccatgaatcaaaca

SEQ ID NO: 79664 - DNA, 110 bp, synthetic construct; identical to SEQ ID NO: 79662
  source 1..110: mol_type = other DNA

SEQ ID NO: 79665 - DNA, 110 bp, synthetic construct; identical to SEQ ID NO: 79663
  source 1..110: mol_type = other DNA

SEQ ID NO: 79666 - DNA, 110 bp, synthetic construct
  source 1..110: mol_type = other DNA
gttctccatgtctcagcacccagtttcccaaaaatcactttacttgtttactctgttttgtgcccctgtccatgtatgattcgttatcccctcgctcatggcacataacc

SEQ ID NO: 79667 - DNA, 110 bp, synthetic construct
  source 1..110: mol_type = other DNA
ttttgtgcccctgtccatgtatgattcgttatcccctcgctcatggcacataaccagtttaaactgagtaaatgcttgatgatggaaatggggattaatattatattata

SEQ ID NO: 79668 - DNA, 110 bp, synthetic construct
  source 1..110: mol_type = other DNA
ttcaatattattgcaactatctcagccacacttgccactacagtctgttcacaacacacaagcctgagtgatcctgttaaataatttatcttttgtatttgactcccaat

SEQ ID NO: 79669 - DNA, 110 bp, synthetic construct
  source 1..110: mol_type = other DNA
acacaagcctgagtgatcctgttaaataatttatcttttgtatttgactcccaatggtatcctgttttacagagtaaaacccaaatccttacagcaaacttaaagctcct

SEQ ID NO: 79670 - DNA, 110 bp, synthetic construct
  source 1..110: mol_type = other DNA
gaaatatcccaacatatttctgggaacctagaatgtcacatgcatattcacaactgttcgcaagctcaggaaagacctctaaaggcattgaaatatcccaacatatttct

SEQ ID NO: 79671 - DNA, 110 bp, synthetic construct
  source 1..110: mol_type = other DNA
gttcgcaagctcaggaaagacctctaaaggcattgaaatatcccaacatatttctgtgaacctagaatgtcacacgcatgttcacagctgttcgcaagctcaggaaagac

SEQ ID NO: 79672 - DNA, 110 bp, synthetic construct
  source 1..110: mol_type = other DNA
attaattaccaacagttgttgaggaataaagcaaacttttcttcacttgctaaggaagttgttgtaaagattagttgaactcaagtcctagcagagttataacttgttag

SEQ ID NO: 79673 - DNA, 110 bp, synthetic construct
  source 1..110: mol_type = other DNA
aagttgttgtaaagattagttgaactcaagtcctagcagagttataacttgttagcttattttacaaggctaatggaattttctggatcccagactatctggatcataag

SEQ ID NO: 79674 - DNA, 110 bp, synthetic construct
  source 1..110: mol_type = other DNA
ggacaaaaggctgaacttggggagtttatggaagctccattagatagttgtggttgattaaatcattggctaatggtgactgatttaacctcaatcctctctgcccttcc

SEQ ID NO: 79675 - DNA, 110 bp, synthetic construct
  source 1..110: mol_type = other DNA
cattccatttagtttaccaggcagcctcccaaaataaagatgaattaaagactcaggaaataaaggcccttgctattaattcttttacagttatctttctctcagaaact

SEQ ID NO: 79676 - DNA, 110 bp, synthetic construct
  source 1..110: mol_type = other DNA
ggaaataaaggcccttgctattaattcttttacagttatctttctctcagaaactccttggcaatcaggagataagacctgatctttatattcgtgtttttgtaacttta

SEQ ID NO: 79677 - DNA, 110 bp, synthetic construct
  source 1..110: mol_type = other DNA
aaagttacagctaaaagtagaaaattctgactggcatccacttatcaacatcatagtgaaaaatactaggacaacagtatattggaaggtcttacccataagctatttaa

SEQ ID NO: 79678 - DNA, 110 bp, synthetic construct
  source 1..110: mol_type = other DNA
gtgaaaaatactaggacaacagtatattggaaggtcttacccataagctatttaaacttttggatgtataaacttctcctcctagccttgtcctggatttttgacctaac

SEQ ID NO: 79679 - DNA, 110 bp, synthetic construct
  source 1..110: mol_type = other DNA
ctgcacaaagcccacttggatggggtccattttaaattgacatcagaatcaccacttcaaaattagcccttttatatcctcttaggtgataaaactagtttttgaataat

SEQ ID NO: 79680 - DNA, 110 bp, synthetic construct
  source 1..110: mol_type = other DNA
ggtttttttttttgataggagtggaggattttaataaagtggataggatgacctagtcttatgataacattaagcttattttcccagttactcctgtcatttcccaatgg

SEQ ID NO: 79681 - DNA, 110 bp, synthetic construct
  source 1..110: mol_type = other DNA
gtcttatgataacattaagcttattttcccagttactcctgtcatttcccaatggactcatgaacagaatgatcctgttggcaaggatggagataatccacaggttagac

SEQ ID NO: 79682 - DNA, 110 bp, synthetic construct
  source 1..110: mol_type = other DNA
ataagcaaagcagtcagtaccttcgttgactgcttatgaaaacttgtacttctcatatgtttccatgcttttctagggcctattttggtatttattgtattttgtagttt

SEQ ID NO: 79683 - DNA, 110 bp, synthetic construct
  source 1..110: mol_type = other DNA
gttcatcacaaatctttgtcagcataaaatggagcttcaaagttgctatatgctagagtttacgttaaaggccaagtatcatctaacataacacaggatgtgttttctgc

SEQ ID NO: 79684 - DNA, 110 bp, synthetic construct; identical to SEQ ID NO: 79683
  source 1..110: mol_type = other DNA

SEQ ID NO: 79685 - DNA, 110 bp, synthetic construct
  source 1..110: mol_type = other DNA
atggttttcagtgtttactagctatgtctaggagcaagtttattaacctttctataatttatccatcaaatgaggacaataattgttccaatctcacaggttttctgtga

SEQ ID NO: 79686 - DNA, 110 bp, synthetic construct
  source 1..110: mol_type = other DNA
attattcatttatttattgcctatggatatcctattgcccaagcaccatttgtcgaaaaagcttttttccatttaattgcatttgcacttgttatcaaaaaaatgttggg

SEQ ID NO: 79687 - DNA, 110 bp, synthetic construct
  source 1..110: mol_type = other DNA
gttgcttttactgtcatgctggcctactgcttttatgtaagctatttctgagttaaacaaaaatgtctacttaaaaatctgttgcttttttatgctttttaggtttgttt

SEQ ID NO: 79688 - DNA, 110 bp, synthetic construct; identical to SEQ ID NO: 79687
  source 1..110: mol_type = other DNA

SEQ ID NO: 79689 - DNA, 110 bp, synthetic construct
  source 1..110: mol_type = other DNA
gcagcttacacttaaaatagttaagatggtcaatttttatgtgtttaaaaataagcatcgccccatggagctcttataagaatagagtttcttagcagttgaaaacgctc

SEQ ID NO: 79690 - DNA, 110 bp, synthetic construct
  source 1..110: mol_type = other DNA
catcgccccatggagctcttataagaatagagtttcttagcagttgaaaacgctcattgctggagttcccattgtgactcagcagaaacctgactaacatccatgaggac

SEQ ID NO: 79691 - DNA, 110 bp, synthetic construct
  source 1..110: mol_type = other DNA
ggttttttgtaacagcttttcagggaagagcctgtcatcatttaaatttttcctacaggtggttgccagaaagacaggagccaggcactgagaagcagtttctgaacaac

SEQ ID NO: 79692 - DNA, 110 bp, synthetic construct
  source 1..110: mol_type = other DNA
gtcactaaccaaataaccctatcttttctcactgacaacaaaaccacttccttcacacatcaagtttccttatgtgtggggtgtttgtttctgggcttttaagctttaaa

SEQ ID NO: 79693 - DNA, 110 bp, synthetic construct; identical to SEQ ID NO: 79692
  source 1..110: mol_type = other DNA

SEQ ID NO: 79694 - DNA, 110 bp, synthetic construct
  source 1..110: mol_type = other DNA
ttttttcaatacacggaagagcaaagggtgaataaaggtatagtcataataaagaaatggaaagggaaagaaaagatgagtgaggtaggtcaagtgcggaatgggacctg

SEQ ID NO: 79695 - DNA, 110 bp, synthetic construct
  source 1..110: mol_type = other DNA
atttcctgattatttcttgttatacatctgtctccaaagctaacaacattaagcgaaaattctgccttgatttcaggccaacactcagtgcaggagacaggcacattcat

SEQ ID NO: 79696 - DNA, 110 bp, synthetic construct
  source 1..110: mol_type = other DNA
gtcccactgaatcagaatctgcattttaaagcctcctaaaggattcagatgtccatggaaatatgagaacatggctcaagaagactgcactccatttagtttctgcttgc

SEQ ID NO: 79697 - DNA, 110 bp, synthetic construct
  source 1..110: mol_type = other DNA
atgctagttagcagtactgataactctatataactttttcctcccatttttagagtgacattttcttttacacattctcttcagggattaggagaatggctggtggggac

SEQ ID NO: 79698 - DNA, 110 bp, synthetic construct
  source 1..110: mol_type = other DNA
tgacattttcttttacacattctcttcagggattaggagaatggctggtggggacaggctgtcaggttcacaatctgggctttgacactttttagctgtgtgaccttggg

SEQ ID NO: 79699 - DNA, 110 bp, synthetic construct
  source 1..110: mol_type = other DNA
aaacaacatttgtatgtcctaactgttagcattcttctctataggcatgaacgcactcccctaaatgtacccatgggggagtttctgatcttatttctaatgtttaagta

SEQ ID NO: 79700 - DNA, 110 bp, synthetic construct
  source 1..110: mol_type = other DNA
cctagtttttccatctctgtcctcctttactttccaggtctctcaactctccttctctcctctttctcggtttcccttccatcaggatcaggaggttctcttcctacatc

SEQ ID NO: 79701 - DNA, 110 bp, synthetic construct
  source 1..110: mol_type = other DNA
tctcctctttctcggtttcccttccatcaggatcaggaggttctcttcctacatctgctctagatccttctctcttgactgacccttgtttccaggtgagggaaggcaaa

SEQ ID NO: 79702 - DNA, 110 bp, synthetic construct
  source 1..110: mol_type = other DNA
tctccaacagaacatggtacttgatgtccagaatcaaagcacacttgcaagcttgggtcttctcatcttgcctgggaaatgagtaggcacccctgcacctgtggcctctc

SEQ ID NO: 79703 - DNA, 110 bp, synthetic construct
  source 1..110: mol_type = other DNA
ggtcttctcatcttgcctgggaaatgagtaggcacccctgcacctgtggcctctcctagaaccccatgtgggtttttctactcaggccaactcttctgcccccaaagctt

SEQ ID NO: 79704 - DNA, 110 bp, synthetic construct
  source 1..110: mol_type = other DNA
agcatctctaggaagtgaatgcttggtatggttatcttgttgtcatgacaagattgaaactaattttatgtttaaaaaattagtcagagccacatattgtatgattccat

SEQ ID NO: 79705 - DNA, 110 bp, synthetic construct
  source 1..110: mol_type = other DNA
cttgttgtcatgacaagattgaaactaattttatgtttaaaaaattagtcagagccacatattgtatgattccatttatatgaaatgtccagggtaggtaaatacgtcga

SEQ ID NO: 79706 - DNA, 110 bp, synthetic construct
  source 1..110: mol_type = other DNA
ttcccccagtaaccaacagtttgttctctatatctttgagtcttatgttcactggtctgttgtatttcttagattccacataatgtgatatcatacaatatttgtctgtc

SEQ ID NO: 79707 - DNA, 110 bp, synthetic construct
  source 1..110: mol_type = other DNA
cccctcagtctcaaactgttggcataagtcgaccagccggtgcccctgagatatacagtaatctggagacactattttgtcagctgctaaaactacaaacctcgtatctt

SEQ ID NO: 79708 - DNA, 110 bp, synthetic construct
  source 1..110: mol_type = other DNA
cagtaatctggagacactattttgtcagctgctaaaactacaaacctcgtatctttgttgagttaaaactgactaaaatttcttttttctagagtggatttgtgagcaga

SEQ ID NO: 79709 - DNA, 110 bp, synthetic construct; identical to SEQ ID NO: 79707
  source 1..110: mol_type = other DNA

SEQ ID NO: 79710 - DNA, 110 bp, synthetic construct; identical to SEQ ID NO: 79708
  source 1..110: mol_type = other DNA

SEQ ID NO: 79711 - DNA, 110 bp, synthetic construct
  source 1..110: mol_type = other DNA
cttgttagtaaatgtaagtgattcctgaaagttgacataaaaacattgaggccaagctctcttcaaagggaagatactgtaagtctcccaaagtctaatcaaagtgaata

SEQ ID NO: 79712 - DNA, 110 bp, synthetic construct
  source 1..110: mol_type = other DNA
gatggggagaaaagaaatgacagggatccttgggagctggcctctctctccggaatgccccacattactcttctctcttagatttgtcttgcttaatattttaggcagaa

SEQ ID NO: 79713 - DNA, 110 bp, synthetic construct
  source 1..110: mol_type = other DNA
ctctgtttcttcattttcctggactctttgtgttgttttctatgtattatataaaatagctgcctctcctagtcttgatagaatggttttggttaggatatgaaccttgt

SEQ ID NO: 79714 - DNA, 110 bp, synthetic construct
  source 1..110: mol_type = other DNA
atagctgcctctcctagtcttgatagaatggttttggttaggatatgaaccttgtccagcagcctggtctgtatccctggttgtctcttaaacctttgtgattgtccaag

SEQ ID NO: 79715 - DNA, 110 bp, synthetic construct
  source 1..110: mol_type = other DNA
tctttttgaacaaattaagcaaaacacgggatgattggcatccttttcatcccttccctcatccatatcaacaactagctccctttgatttcagggactttaagaaaaaa

SEQ ID NO: 79716 - DNA, 110 bp, synthetic construct
  source 1..110: mol_type = other DNA
tgttctgggatgatggtgaaataccagaccacacatattggcagtcaggcaagctgtggagagagatgacacccccttaatggcagctgaagggcctcatgaggtctgta

SEQ ID NO: 79717 - DNA, 110 bp, synthetic construct
  source 1..110: mol_type = other DNA
gtggagagagatgacacccccttaatggcagctgaagggcctcatgaggtctgtacaaaggccccccaactaccttttgcaagaagggggtatggtgactgagtgactct

SEQ ID NO: 79718 - DNA, 110 bp, synthetic construct
  source 1..110: mol_type = other DNA
catctctgggcatataaagttgaactttctgaacgctcatcactgctcctgaattttctagctcacctggtgttagtttgccattcgtcttagtcatgttggctaccaga

SEQ ID NO: 79719 - DNA, 110 bp, synthetic construct
  source 1..110: mol_type = other DNA
ttctagctcacctggtgttagtttgccattcgtcttagtcatgttggctaccagagagcaacacagagctgacttggagccctgagtaagtagggcaggcctgtcagccc

SEQ ID NO: 79720 - DNA, 110 bp, synthetic construct
  source 1..110: mol_type = other DNA
ccccttcaggcactcggacgaaacccgcaccagtccaggagggaatccggtcctggacatactgccgttccacaatgctgaccccctggggacaaagggacaggggtatt

SEQ ID NO: 79721 - DNA, 110 bp, synthetic construct
  source 1..110: mol_type = other DNA
gacatactgccgttccacaatgctgaccccctggggacaaagggacaggggtattgctttacttgaaatggagttcaattcatgtaacagtcaaagaagttgcttaactc

SEQ ID NO: 79722 - DNA, 110 bp, synthetic construct
  source 1..110: mol_type = other DNA
taaaccatcctaactattcgttaagggccagctggctgtccttacaaacaaaaccttggccactgcagccctccctgatttctgagttcgtagaataatcctcactgggg

SEQ ID NO: 79723 - DNA, 110 bp, synthetic construct
  source 1..110: mol_type = other DNA
tcatcccctctgtcctgcaatcccagtcaagtccttggccacctcttactatgtgtcccggagtctctggaccacacaggcatctacctggcttcctatgtggctttgga

SEQ ID NO: 79724 - DNA, 110 bp, synthetic construct
  source 1..110: mol_type = other DNA
tgagaggccgtgtgtgctttttcctgtaaggagaaaaagctggggctacactgctggaaagatgtgagaaactcagggcccaccgctccagagccctgctagtagccagc

SEQ ID NO: 79725 - DNA, 110 bp, synthetic construct
  source 1..110: mol_type = other DNA
cacagggctatatgccaaatatgtgttaatgaagctggaaagcaataacagcaaaaacaaatggctagaggttgggtaagaggctgatgcaggggtgtggagagaacctg

SEQ ID NO: 79726 - DNA, 110 bp, synthetic construct
  source 1..110: mol_type = other DNA
ccagaaaaattcagtgtgatggaagcatgctctaaaatgtaacggataatggacgaagtaaaatataagacacaggaaagaaaggtcagaactatgaccttttcacaaat

SEQ ID NO: 79727 - DNA, 110 bp, synthetic construct
  source 1..110: mol_type = other DNA
ccccacacacctctctccaaactgtttctggatctgtggctgttgacataatagaggtattaccttgaatggtggggtcgcccaccacagtgtcccttcgatgaggccaa

SEQ ID NO: 79728 - DNA, 110 bp, synthetic construct
  source 1..110: mol_type = other DNA
ggtattaccttgaatggtggggtcgcccaccacagtgtcccttcgatgaggccaacccagagtcctggtatgattttatgtgcaggaagcctggactaagcatcgtgtcc

SEQ ID NO: 79729 - DNA, 110 bp, synthetic construct
  source 1..110: mol_type = other DNA
ttccacaaaggtattggtctttttagtaatagtcaccaaatgcctgtatccttattatatttggtgacaataaggctcaaatactaaaatgatccctgtttgagtattac

SEQ ID NO: 79730 - DNA, 110 bp, synthetic construct
  source 1..110: mol_type = other DNA
ggaaaggatgacgtaggtctaggggaaggtcagcttgagtcatcaaggtcactaagacattctagttttttattttttggctgtacgcatgacatgtggaagctcacagg

SEQ ID NO: 79731 - DNA, 110 bp, synthetic construct
  source 1..110: mol_type = other DNA
tccacatcttttctcacttccatcttttccaaggcattgtgtggccagagtttttcatacccctcctgtttccttttcttggaaccatactcctggtctcttagagaatt

SEQ ID NO: 79732 - DNA, 110 bp, synthetic construct
  source 1..110: mol_type = other DNA
gttagtgctggcaagtgtcatttttgagtcttccctctaacatattagtgtttggacttaccctctcaccaatgggctggcaccagctctggatactcccagaccggcag

SEQ ID NO: 79733 - DNA, 110 bp, synthetic construct
  source 1..110: mol_type = other DNA
ccaataacttctgatcctttgtgaaaggaagtttttcaagaaacattcactgctaaaagacctacatagagccaacctttccgagtgaaacaataatgtaattttaataa

SEQ ID NO: 79734 - DNA, 110 bp, synthetic construct; identical to SEQ ID NO: 79733
  source 1..110: mol_type = other DNA

SEQ ID NO: 79735 - DNA, 110 bp, synthetic construct
  source 1..110: mol_type = other DNA
tttttctaagttttcagtacagagcaggagcaagtttggggtctggcctagcaagtgacaagagatgggactgaattctgtttgagtatgttggttgcaggaccctgaag

SEQ ID NO: 79736 - DNA, 110 bp, synthetic construct
  source 1..110: mol_type = other DNA
ggcattgcacttcattcgaaaaatatttattgagtggcgactacagcctacattggttctcgtttagaaaatgtgattgtaagtgagcccaggtccttttccttatagag

SEQ ID NO: 79737 - DNA, 110 bp, synthetic construct
  source 1..110: mol_type = other DNA
gttctcgtttagaaaatgtgattgtaagtgagcccaggtccttttccttatagagctaatattgttttggaaaagataggtattaaataaagttcacacaggataaatgt

SEQ ID NO: 79738 - DNA, 110 bp, synthetic construct
  source 1..110: mol_type = other DNA
taaaacaaaacataaactgacaggggtgctagccagaaaaagggaacagaacagagtagctggtaacagcttgggctttgccttagaaaaaatgtaggcttgtgttctaa

SEQ ID NO: 79739 - DNA, 110 bp, synthetic construct
  source 1..110: mol_type = other DNA
gtagctggtaacagcttgggctttgccttagaaaaaatgtaggcttgtgttctaattttcttccttatcttaggattttactgaggtatttcttaaatctccaaagtcat

SEQ ID NO: 79740 - DNA, 110 bp, synthetic construct
  source 1..110: mol_type = other DNA
tgattttgtcaaaaatgcatcttgttacagggcatgcattctctgttcctgcctcttacacattccagttagcctacatttctttttaaatgtggttccccaaagcagga

SEQ ID NO: 79741 - DNA, 110 bp, synthetic construct
  source 1..110: mol_type = other DNA
ttacacattccagttagcctacatttctttttaaatgtggttccccaaagcaggagttcctgttgtggctcagcccattatgaaccctactagtatccatgaggatgcag

SEQ ID NO: 79742 - DNA, 110 bp, synthetic construct
  source 1..110: mol_type = other DNA
ccggtagcttgcgcagaagtgctcagtctcccctaaacgagaagaagtttcttgcccatgtagcctgtgccagagctgccccatcctctgagcgtctgcaggcatgcaca

SEQ ID NO: 79743 - DNA, 110 bp, synthetic construct
  source 1..110: mol_type = other DNA
ccatgtagcctgtgccagagctgccccatcctctgagcgtctgcaggcatgcacacgctccattgcagggtgtttcctatggtggtctgcccctccttgtctcaccttcc

SEQ ID NO: 79744 - DNA, 110 bp, synthetic construct
  source 1..110: mol_type = other DNA
caaggagttgtatgcttattatgtggccaagtctggaattttgatgaaacgtcaagatactctgttatggaatcttacatgatgatctggacaacacacattgttgttgg

SEQ ID NO: 79745 - DNA, 110 bp, synthetic construct
  source 1..110: mol_type = other DNA
atgtgctcattggaaagacataccctgtgcattatcagggcctctccagtggtcgcttatgtagaggaaaagcaggagcatttgaagagcaatcactgtgtgaattctgg

SEQ ID NO: 79746 - DNA, 110 bp, synthetic construct
  source 1..110: mol_type = other DNA
cccagggagttccacagttgaatctcttccctgatcatggccaccccagatcctgtgttgtattctgacatggagtgaacagagctagagtgttttctcagctcagatgc

SEQ ID NO: 79747 - DNA, 110 bp, synthetic construct
  source 1..110: mol_type = other DNA
actacatttgagactggatttgtagcctaatttagcacttcaaaactcaaagcaaatattaatacagcttctcaattcaagggatattatcttgtaagtcaaatgagcaa

SEQ ID NO: 79748 - DNA, 110 bp, synthetic construct
  source 1..110: mol_type = other DNA
ttgttttgcaaggttggggcagtgtggcatgaggcactcagtaaatttgggcaatccagccagctaagcaggggcacagatctctagatgatcttgagtaggtgcatggt

SEQ ID NO: 79749 - DNA, 110 bp, synthetic construct
  source 1..110: mol_type = other DNA
atgtctgtggctaccccatcccagtagatgatacagcccatccaggctccatcttcattagggcctgcctcatgattccatcctagctcctgaattagactgtctataca

SEQ ID NO: 79750 - DNA, 110 bp, synthetic construct
  source 1..110: mol_type = other DNA
agttcctcaatttatccatttgtcccaatttctctattactatggagttactaggttttttttttccagccaatgttagcctccaatttatgctataaatcctatccatc

SEQ ID NO: 79751 - DNA, 110 bp, synthetic construct
  source 1..110: mol_type = other DNA
acaccagtgggccagcaatagctctgggaccacttggaaacaggtagctagccacttcctgaacatgtctgcccaccaccaccatctgcagaaggcaaggcctggcaacc

SEQ ID NO: 79752 - DNA, 110 bp, synthetic construct
  source 1..110: mol_type = other DNA
ttcctgaacatgtctgcccaccaccaccatctgcagaaggcaaggcctggcaaccaacagaactgcgggtcagtcacacctaccaggccacccagagcagtcagcctgcc

SEQ ID NO: 79753 - DNA, 110 bp, synthetic construct
  source 1..110: mol_type = other DNA
agaacgtaaacagcacaaatcttaatgatgtaaaaacagccttacgaaaccaacaaaaatcagctgttataggaggacaacaatgaggatcataagaaaacaaatctccc

SEQ ID NO: 79754 - DNA, 110 bp, synthetic construct
  source 1..110: mol_type = other DNA
tgtcctgcgtaatggttacacaggctttcactataaaggaattctttcaattaaataaatacattttatgcactcttcagcatggatgatatagctcacaactgaaaaat

SEQ ID NO: 79755 - DNA, 110 bp, synthetic construct
  source 1..110: mol_type = other DNA
tgtttcaagctaccaacattgagcgggagcggagggatagggtcatataaataaactgaaaggtctataatttgtggttttacattttattttgttttaattttggccat

SEQ ID NO: 79756 - DNA, 110 bp, synthetic construct
  source 1..110: mol_type = other DNA
ctgaaaggtctataatttgtggttttacattttattttgttttaattttggccatgcctgcagcatgtctaagttccccacaccagggatcaaacccacaccacagcggt

SEQ ID NO: 79757 - DNA, 110 bp, synthetic construct
  source 1..110: mol_type = other DNA
attgatagccccttggtaggtcacagttagaagggaagctgggtctggccggcggctggctctctgctacatggggcatattttgtcatgggctttaaacacttttccct

SEQ ID NO: 79758 - DNA, 110 bp, synthetic construct
  source 1..110: mol_type = other DNA
gcacactcatttaggaaaatccccattggccaaattcaaggataagcagcctatatcctaaggatgcctgtgctcacaaccagttgagtgccctgcctgacctgtgcctt

SEQ ID NO: 79759 - DNA, 110 bp, synthetic construct
  source 1..110: mol_type = other DNA
tcctaaggatgcctgtgctcacaaccagttgagtgccctgcctgacctgtgcctttgccgagtctttgcagctctgctgtgattaccattagccctgtggtgtttgaact

SEQ ID NO: 79760 - DNA, 110 bp, synthetic construct
  source 1..110: mol_type = other DNA
tcactcagttcaaccatatctccttccactcaacatgcttgtcaccatgaccttcccaatattttcccaaacatatcaagctagtttctacctccatccccattgttccc

SEQ ID NO: 79761 - DNA, 110 bp, synthetic construct
  source 1..110: mol_type = other DNA
taggggcttgctattccccagaacttaaaatattgggcagattgtaattccatagggttagacaaatgaaatagtagttaagaataatagttaagtaaaaagttattcct

SEQ ID NO: 79762 - DNA, 110 bp, synthetic construct
  source 1..110: mol_type = other DNA
aagacattttttggcttatataagctctgagaaagcactttgggattctcttcactatggttccttgttacaggcactgaaagtgttgtcttgaatgagggtcttcagtc

SEQ ID NO: 79763 - DNA, 110 bp, synthetic construct
  source 1..110: mol_type = other DNA
tatggttccttgttacaggcactgaaagtgttgtcttgaatgagggtcttcagtccacttctggtcaagagaaaggacatgaaccaagagaatcttgagactacagggtc

SEQ ID NO: 79764 - DNA, 110 bp, synthetic construct
  source 1..110: mol_type = other DNA
ggcctaccacttcatatagatcatagtcttcaccatttggtaatattgcaaaatattccgtttatcttattcatctttcttgcaaacccacaaagttttatcttcttcta

SEQ ID NO: 79765 - DNA, 110 bp, synthetic construct; identical to SEQ ID NO: 79764
  source 1..110: mol_type = other DNA

SEQ ID NO: 79766 - DNA, 110 bp, synthetic construct; identical to SEQ ID NO: 79764
  source 1..110: mol_type = other DNA

SEQ ID NO: 79767 - DNA, 110 bp, synthetic construct; identical to SEQ ID NO: 79764
  source 1..110: mol_type = other DNA

SEQ ID NO: 79768 - DNA, 110 bp, synthetic construct
  source 1..110: mol_type = other DNA
ggcacaatgggaactccattctctcatgagttgattactatatttattgttgtatatgaattgcttttttttttttaaatgagtgtgccagtggtagttttttggcttgt

SEQ ID NO: 79769 - DNA, 110 bp, synthetic construct
  source 1..110: mol_type = other DNA
atgagttgattactatatttattgttgtatatgaattgcttttttttttttaaatgagtgtgccagtggtagttttttggcttgttgttcccatgaggtttagatgtagg

SEQ ID NO: 79770 - DNA, 110 bp, synthetic construct
  source 1..110: mol_type = other DNA
gactgtaaacttttgtcccccatcaaaggaggcagttcacttctctgcaaagattacttagaaggcattccttggagttcccatcatggcgcagtggttaacgaatgcga

SEQ ID NO: 79771 - DNA, 110 bp, synthetic construct
  source 1..110: mol_type = other DNA
tcctgcctctatgggcattgacttagccaaggaaccatgactcctctctaagatttgatccataccttatctgagattgtttaattcaatttcttcattgtacagaataa

SEQ ID NO: 79772 - DNA, 110 bp, synthetic construct
  source 1..110: mol_type = other DNA
tgatccataccttatctgagattgtttaattcaatttcttcattgtacagaataaatatagaggaaaatataatccttttcagtgcctggcatcgaactctccacactcc

SEQ ID NO: 79773 - DNA, 110 bp, synthetic construct
  source 1..110: mol_type = other DNA
agcacaagaaaggcaagagatacctaccagagaaagaacgctgtgagggtaggcgacaggaaagctttctggaggaaataacattgacctgagtttaaaaagtgcaacag

SEQ ID NO: 79774 - DNA, 110 bp, synthetic construct
  source 1..110: mol_type = other DNA
gattatgggagaaagaatcagtttaagtaatcctaaacaatgtagaagttaaactggatagatacttggagaccagattttataggatctgttaggattttatcctaagg

SEQ ID NO: 79775 - DNA, 110 bp, synthetic construct
  source 1..110: mol_type = other DNA
gcaaattttgagcaaatcttcatttgaacaataattttactataggatattatggggatggaacaagatcgtgcatggaagcagctggcacaatgtcaggcccacaacag

SEQ ID NO: 79776 - DNA, 110 bp, synthetic construct
  source 1..110: mol_type = other DNA
aaattcatttaatttctctcctctggaagttgatcttgtaatagggaggtaaaccctgtccataaataggagaagagggaatttattacatatgggaaatgaggaatccc

SEQ ID NO: 79777 - DNA, 110 bp, synthetic construct
  source 1..110: mol_type = other DNA
atgctattaattggggggaatgtccctgatgtcttaaaacttaattaattcactctgacagtgtgagcttcataatttgtgcaaataaccatccccatcaactataacaa

SEQ ID NO: 79778 - DNA, 110 bp, synthetic construct
  source 1..110: mol_type = other DNA
cctccagagcccccaaagtcatggaattaaagaattatatttcaaacactaggttgattagcaaatattatggaatttggggcactgaaggcacgccccctaccccctac

SEQ ID NO: 79779 - DNA, 110 bp, synthetic construct
  source 1..110: mol_type = other DNA
tttattttattattttttctttttgaggccacacctgagacctatggaagatcctgggctaggagtcaaatgggaactacagttacagcctatgccacagccacagcaaa

SEQ ID NO: 79780 - DNA, 110 bp, synthetic construct
  source 1..110: mol_type = other DNA
acctcatacaattttttaaaagtaacagtggccctcagctgaaagatggcaacccatgggtgtagagaatggggcaggatgcccaccagctccttccctccacctttccc

SEQ ID NO: 79781 - DNA, 110 bp, synthetic construct
  source 1..110: mol_type = other DNA
agtcagtggataatctccttgatatcataagattattctttcttaatgtgtatgtctgtttgttaaagtagtttcacacattgactggtaaggaaaagggctggggagag

SEQ ID NO: 79782 - DNA, 110 bp, synthetic construct
  source 1..110: mol_type = other DNA
tagcatccttaacccaatgagccacagtgggcattccagcattccctcataccgttctttcatgcactgttcctttaccctggcagacccttttccttctccacccaatg

SEQ ID NO: 79783 - DNA, 110 bp, synthetic construct; identical to SEQ ID NO: 79782
  source 1..110: mol_type = other DNA

SEQ ID NO: 79784 - DNA, 110 bp, synthetic construct
  source 1..110: mol_type = other DNA
ttgaccaccagctccttctgaggcccaaaccatagagctgggaggagactggcggaccaccaactctcccccatatgtcccaggcagattgaattgagggccgttttaag

SEQ ID NO: 79785 - DNA, 110 bp, synthetic construct
  source 1..110: mol_type = other DNA
gctgaaagtcagcagtttcttactccctgatagtcaagctgtggctcagaggatttaaacttaaaatttcccagaagccaagcaaggaactgaaacaagagaagtcacat

SEQ ID NO: 79786 - DNA, 110 bp, synthetic construct
  source 1..110: mol_type = other DNA
caaagatcagttgcctatatttttgtgcatctatttctgggctctctattctatcccctgatctagttttctgttcttctgccagtaccactgtgtcatgattcttgcag

SEQ ID NO: 79787 - DNA, 110 bp, synthetic construct
  source 1..110: mol_type = other DNA
ccctgatctagttttctgttcttctgccagtaccactgtgtcatgattcttgcagcataagaagtcttcaagttgggtagcatcagtcctccagttttgttctaatcctt

SEQ ID NO: 79788 - DNA, 110 bp, synthetic construct
  source 1..110: mol_type = other DNA
tgatgttgtagctgtccttatattatgatggtgatgatgattccctggttgtcattactaagaaccagagattccttgaattgaaacttaagaaatcatgtgtaaatatc

SEQ ID NO: 79789 - DNA, 110 bp, synthetic construct
  source 1..110: mol_type = other DNA
tactaagaaccagagattccttgaattgaaacttaagaaatcatgtgtaaatatccccgagctgttttcttagcctttctcgttaacagtgtttttacattgaaactgct

SEQ ID NO: 79790 - DNA, 110 bp, synthetic construct
  source 1..110: mol_type = other DNA
gcccctcaaaaaaagccggtgtcaggaaaaatggaaaagatggctgggggactgtcttggattaaaagagactaaatgcagtgcttgaatcttaattggatctgaattgg

SEQ ID NO: 79791 - DNA, 110 bp, synthetic construct
  source 1..110: mol_type = other DNA
aaatgaatgaatgagtgaacaagggaatgaacccttctcccaggaaccagtcccaaaccccaagatctcaatattctcttcttctcgactccatgcccttgtggagctgc

SEQ ID NO: 79792 - DNA, 110 bp, synthetic construct
  source 1..110: mol_type = other DNA
aaccccaagatctcaatattctcttcttctcgactccatgcccttgtggagctgccagcaaatgagggctgatcaaggaccaagcccggctctgccagggtcttggggtg

SEQ ID NO: 79793 - DNA, 110 bp, synthetic construct
  source 1..110: mol_type = other DNA
agtcagtcatggtcaactcaggacccaatgtgatgtacactgcatgaataatgtagttaatggaccattctggccttcatggggctgttatggagggaattgctttgccc

SEQ ID NO: 79794 - DNA, 110 bp, synthetic construct
  source 1..110: mol_type = other DNA
gttaatggaccattctggccttcatggggctgttatggagggaattgctttgcccacatgccagttacatatctatattcatacacattttttttctcatcgaaaggtta

SEQ ID NO: 79795 - DNA, 110 bp, synthetic construct
  source 1..110: mol_type = other DNA
gggctagttatatgtgtgagcacccttaggtattttatagcacctctggcttactatttatttttagggtattgtgtgggcttccagggagatggaggcaatggacaaag

SEQ ID NO: 79796 - DNA, 110 bp, synthetic construct
  source 1..110: mol_type = other DNA
ctttctatttctattctctatggatttttgtctctttcggacatttcctataactacaatgtgtggtccttcgcgactggtttctttgacttagtgtcatgtttcaaagt

SEQ ID NO: 79797 - DNA, 110 bp, synthetic construct
  source 1..110: mol_type = other DNA
tgcactcgctccttcacggctcacggtacgtagagttactaagatgctgtcacatgccccgccctgcccttggagctggaagcatattggtgaacaagatagttcttttt

SEQ ID NO: 79798 - DNA, 110 bp, synthetic construct
  source 1..110: mol_type = other DNA
gccccgccctgcccttggagctggaagcatattggtgaacaagatagttcttttttttcttttttttcccccaaaggccaagtttcccattttattgttattgttattat

SEQ ID NO: 79799 - DNA, 110 bp, synthetic construct
  source 1..110: mol_type = other DNA
ccttaggcaggaccaccttagatgtttaatgaaagaatgctaatgagaaaagtgtagaaagaggcataaaaaagtatgatcagagagtagttttccagcacttggtatac

SEQ ID NO: 79800 - DNA, 110 bp, synthetic construct
  source 1..110: mol_type = other DNA
ctcatatgtattgaagacaaaaggaattctttaaggatttgcagctttagaaggagagtatcagcaatggtaaagcacttccattaaacgactttataaaaatcagacat

SEQ ID NO: 79801 - DNA, 110 bp, synthetic construct
  source 1..110: mol_type = other DNA
tcagaagtactggtaaagtttaggatgatgaaggttttactctgtttctaatacccaacttgaaagaaaaggcatcaagtgaaggtttctataaaaaggcaatacagtct

SEQ ID NO: 79802 - DNA, 110 bp, synthetic construct
  source 1..110: mol_type = other DNA
acgccatggtggagaggaggcagacagcaatcacacatagtcttcaacaaggcgattatcatgttgggaaggaagggagaaaagggctgaaatccagtgggtgtatgcca

SEQ ID NO: 79803 - DNA, 110 bp, synthetic construct
  source 1..110: mol_type = other DNA
acgctcagtggattaaggatccagagttgccttgaagtgcagcataagccagcagctgcagctcctattcgaccactagcctggaaattacacgtgctgcaggtgcagct

SEQ ID NO: 79804 - DNA, 110 bp, synthetic construct
  source 1..110: mol_type = other DNA
gtcaaatatgtataacataaaatttaccatgttcaccatttctaagtgtacagtttagtggcattaagtacattcacattgttggacaactgtaatcacctctcatctct

SEQ ID NO: 79805 - DNA, 110 bp, synthetic construct; identical to SEQ ID NO: 79804
  source 1..110: mol_type = other DNA

SEQ ID NO: 79806 - DNA, 110 bp, synthetic construct
  source 1..110: mol_type = other DNA
atcgagcccacatgctcatggatgctattcgggttcattaacttctgagccacgatgggaactccattatgacctgtttcgaaccttcaccttttactgaaggcttctcc

SEQ ID NO: 79807 - DNA, 110 bp, synthetic construct; identical to SEQ ID NO: 79806
  source 1..110: mol_type = other DNA

SEQ ID NO: 79808 - DNA, 110 bp, synthetic construct
  source 1..110: mol_type = other DNA
tgaagttggagtaggctcagctgaaaatcacagctcggttctgtgaagggtttagtgtccatagttcctcttcttcctgggatacatatcatgaaaagctttcaatcctt

SEQ ID NO: 79809 - DNA, 110 bp, synthetic construct
  source 1..110: mol_type = other DNA
catcctggctgatccacagagaagtgagtcaggtctattttaagaatcagttcgactggtcacatggagctattgctattcaaaaacagctatttaccagggaagttaag

SEQ ID NO: 79810 - DNA, 110 bp, synthetic construct
  source 1..110: mol_type = other DNA
gaaactaacacaactttgtaagtcggctgaacaccaataaaaattgtaaaaaaaaaaaaaaaaactaaataaaagaatgattgtagtttctgtgtcctgcctctctgctc

SEQ ID NO: 79811 - DNA, 110 bp, synthetic construct; identical to SEQ ID NO: 79810
  source 1..110: mol_type = other DNA

SEQ ID NO: 79812 - DNA, 110 bp, synthetic construct
  source 1..110: mol_type = other DNA
ttcctcttgatcgctgccaccctgcgctgaaatgacctccagaccaccacaccacagagatgcaacagctttccatggtcttcttcactgcaaatgtgtgtggtctaata

SEQ ID NO: 79813 - DNA, 110 bp, synthetic construct
  source 1..110: mol_type = other DNA
aaagggctctccctccactgcagaggacggtaggtctctatagcaggttgcttcgacttcgcggctctgtggcaccattgccaagtggcagcttccgccagtcatccccc

SEQ ID NO: 79814 - DNA, 110 bp, synthetic construct
  source 1..110: mol_type = other DNA
acttcgcggctctgtggcaccattgccaagtggcagcttccgccagtcatccccccctcactctctctggccccaagtcagagaagagatctctgcctcgcaagcagtgc

SEQ ID NO: 79815 - DNA, 110 bp, synthetic construct
  source 1..110: mol_type = other DNA
ccctttgaaaggctctgtgcttaccaagctttttttttgtgattgctaggcacgcttcgtgttaatttcttcagctccctttcatttgcctttcttcctgagtagggaag

SEQ ID NO: 79816 - DNA, 110 bp, synthetic construct
  source 1..110: mol_type = other DNA
aggacagtgtagacgtgggggttgttctgcctcatagtctccaagcaccaggatgcttggatgtgaagcaactgcaggataaatctagggaggcttgagggaagagaagg

SEQ ID NO: 79817 - DNA, 110 bp, synthetic construct
  source 1..110: mol_type = other DNA
cttggatgtgaagcaactgcaggataaatctagggaggcttgagggaagagaaggagctactgaggaaaggaaagggagctttcacagttacttaactcagctcgggttc

SEQ ID NO: 79818 - DNA, 110 bp, synthetic construct
  source 1..110: mol_type = other DNA
gaagaaaaaaaatttccttttttttgcacatcaaagccatctatagctacgaagcaggactcctgatcagtatgagattatctcaccaaactaataataatataagcaaa

SEQ ID NO: 79819 - DNA, 110 bp, synthetic construct
  source 1..110: mol_type = other DNA
attaatgtttttgactcctgtacattttatggtagcatagcaagcagtctcacggaaggcaggctagccattcacggcctgacacactgtaataggtagaagctttcagt

SEQ ID NO: 79820 - DNA, 110 bp, synthetic construct
  source 1..110: mol_type = other DNA
agaattttttttaaaactaagtgcccaccaacagggagtgcttagctggattatgatatgagtaaatagagatagaatgcagtaaatctacaagcgctgatactaaaaga

SEQ ID NO: 79821 - DNA, 110 bp, synthetic construct
  source 1..110: mol_type = other DNA
agatggtgcagttcctgcccaggtctaaggaaacgaaggagccatactgttcggcagaaagggagttaccagcagctctggacgctctgttcccgaaggctggtttatat

SEQ ID NO: 79822 - DNA, 110 bp, synthetic construct
  source 1..110: mol_type = other DNA
agaaagggagttaccagcagctctggacgctctgttcccgaaggctggtttatatgcctcatacttctaggcctacccttggtcaccattccctcccaatacctctcttt

SEQ ID NO: 79823 - DNA, 110 bp, synthetic construct
  source 1..110: mol_type = other DNA
cggggggcaaaccaggaaggctaaaaaggtcacattcttagacatggaccctcctgcccatgcctgatgaatgtcacatagcgcttagcttctttcccagctccgggttg

SEQ ID NO: 79824 - DNA, 110 bp, synthetic construct
  source 1..110: mol_type = other DNA
gcccatgcctgatgaatgtcacatagcgcttagcttctttcccagctccgggttgccctgggagccctgaacaggtaccattctgaaaaaaaagtttcattcaccgatta

SEQ ID NO: 79825 - DNA, 110 bp, synthetic construct
  source 1..110: mol_type = other DNA
cagcatgtgttggggacataggctcattcaggagcccaggtcttggaggatggtgtgtcgtttacgggctgttcagctcccagccctgcgcccttcccccacccccctcc

SEQ ID NO: 79826 - DNA, 110 bp, synthetic construct
  source 1..110: mol_type = other DNA
acctgcctctacccttcttgctctaaaacaatcattctacctgttttaaattggaacctcacccattcactcttgtaccctcgaggaaggctgagcccgggagctgtgcc

SEQ ID NO: 79827 - DNA, 110 bp, synthetic construct
  source 1..110: mol_type = other DNA
acctcacccattcactcttgtaccctcgaggaaggctgagcccgggagctgtgccaacggcaacaattgagtgaggatgtaaaggaagatagaggagctttattttgttg

SEQ ID NO: 79828 - DNA, 110 bp, synthetic construct
  source 1..110: mol_type = other DNA
gagaggaattctaccctaagatagattatacccagagcctcacacatatgttatttaggtcatttaggtagtgagataaaatgacagagtggaacttttttttattgtta

SEQ ID NO: 79829 - DNA, 110 bp, synthetic construct
  source 1..110: mol_type = other DNA
ggaatgcatgaagcagctggatgcatgggtctggagagagagagagtccagctgagtgtaaaagatttgagagtcattaagtaccacaggtggtagttaaagccatggaa

SEQ ID NO: 79830 - DNA, 110 bp, synthetic construct
  source 1..110: mol_type = other DNA
gattattttctacagaaacgtgcatctgttattggcatgttcgttgtagagaactgtgcttatttatatgaagttatatactattcatcacaggccaaattttctcactc

SEQ ID NO: 79831 - DNA, 110 bp, synthetic construct
  source 1..110: mol_type = other DNA
gtgcttatttatatgaagttatatactattcatcacaggccaaattttctcactcagcctgagacaaggaacaagttgatgatgacccctgatcttgttataatgaatca

SEQ ID NO: 79832 - DNA, 110 bp, synthetic construct
  source 1..110: mol_type = other DNA
gcctcaaaaaatatatagctcactgaaaccctctgctgccagtaaaacggccccctgcccgctcatggttatcagtgctgctcttcctccacgtgatcctgggtaagctg

SEQ ID NO: 79833 - DNA, 110 bp, synthetic construct
  source 1..110: mol_type = other DNA
accctcatgtcaatgtgtttatgaatcaggtgaaaccacatttatcattgtcatatctaaaaccacacttaaattctccaatcagctttcctttcgtcctaagggattaa

SEQ ID NO: 79834 - DNA, 110 bp, synthetic construct
  source 1..110: mol_type = other DNA
agacccagagtagccgagtcttttgttttattattactgttctttttcggccatctcacagcttatggagttcccaggccagggatcaggtctgagccgcagtcacagct

SEQ ID NO: 79835 - DNA, 110 bp, synthetic construct
  source 1..110: mol_type = other DNA
gttactatgtctcagtcactgtactaagctctttacctatgtgatcttatttagttggtaccagtaaccttctcagcggtgctattgttattgaaccagtcttgcccctt

SEQ ID NO: 79836 - DNA, 110 bp, synthetic construct
  source 1..110: mol_type = other DNA
aagcaatgtactaggttcaatcagcccacaaagggaggggactacacacggacctgaggaccagcaggccatcactgggggctgtcttagagactgcctaccatccccct

SEQ ID NO: 79837 - DNA, 110 bp, synthetic construct
  source 1..110: mol_type = other DNA
cggatccctaatccactgagcaaagccaaggatcgaccctgcattctcatgtttgccagtcagattccgttccactgagccacgacaggagctcctatttcattcatctt

SEQ ID NO: 79838 - DNA, 110 bp, synthetic construct
  source 1..110: mol_type = other DNA
ccagtcagattccgttccactgagccacgacaggagctcctatttcattcatctttaaggccactttcatcctattatttaaaaattctatggaatattttggctagttt

SEQ ID NO: 79839 - DNA, 110 bp, synthetic construct
  source 1..110: mol_type = other DNA
caagagaaacctcagaattgcaggtaacattgtccttattcttgccattttctctgataattttagtggtctttggtgccacattactccagagagtcaactatactgtc

SEQ ID NO: 79840 - DNA, 110 bp, synthetic construct
  source 1..110: mol_type = other DNA
aagatgaaaaatgagcaagtgaatgaccatgttcaggaaatccataatatttaaatttctgctagagttctctggtggccagtggctaaggatccagtgttgtccctgct

SEQ ID NO: 79841 - DNA, 110 bp, synthetic construct; identical to SEQ ID NO: 79840
  source 1..110: mol_type = other DNA

SEQ ID NO: 79842 - DNA, 110 bp, synthetic construct
  source 1..110: mol_type = other DNA
aagataaactagtaaagaataaatgcacgtatttacaaattgaagtaagttatatgaaggcattaaatgaagttcagtgattgagaagtacaggttggtcaaggagggac

SEQ ID NO: 79843 - DNA, 110 bp, synthetic construct; identical to SEQ ID NO: 79842
  source 1..110: mol_type = other DNA

SEQ ID NO: 79844 - DNA, 110 bp, synthetic construct
  source 1..110: mol_type = other DNA
tgattctgggttttaaattcatatttacattttacactctgaactcttgtttgtttgctgaaaactccattggaatcctttataggaagagggagaagataaccaaacaa

SEQ ID NO: 79845 - DNA, 110 bp, synthetic construct
  source 1..110: mol_type = other DNA
tgctgaaaactccattggaatcctttataggaagagggagaagataaccaaacaattgattccatcctactatcattctcagcaatcaaagaagaatttttaatatgtta

SEQ ID NO: 79846 - DNA, 110 bp, synthetic construct
  source 1..110: mol_type = other DNA
gcttcttactttaaagggaggaagtgacttgatcagtggtcctatccgtagtagcttgtgcttcctgaattgaatttttgcccaagtatattataaaaaattttacaagt

SEQ ID NO: 79847 - DNA, 110 bp, synthetic construct
  source 1..110: mol_type = other DNA
ccgtagtagcttgtgcttcctgaattgaatttttgcccaagtatattataaaaaattttacaagtgtcctttaggagttcccgttgtggcacagtggaaacaaatccgat

SEQ ID NO: 79848 - DNA, 110 bp, synthetic construct
  source 1..110: mol_type = other DNA
atttatgtagtgcatgtgtgtgcacacgcacatgctcatgcacttttaaaatgatcagatgagggcgactggcccatgtaaatgatgctgtcctctctgctctatatccc

SEQ ID NO: 79849 - DNA, 110 bp, synthetic construct
  source 1..110: mol_type = other DNA
aaactatgcacgtgtacgtgtaaattgtttcagtggcacaattccctgccctcattttcacagaaagatacttttcacaatgtataagtgagcacactcaatacggaacc

SEQ ID NO: 79850 - DNA, 110 bp, synthetic construct
  source 1..110: mol_type = other DNA
ccttgggacctcagtctcatgccaagctgtttatcaacagtttttaaaaatacatttagcgtttccttgaaataatgtgcggaactaattgttaagaaaagaaagctgtc

SEQ ID NO: 79851 - DNA, 110 bp, synthetic construct
  source 1..110: mol_type = other DNA
cgtggccagcaggcccctacatctatattctcctttgagcttctcaaatgggccgtactttcccaccaaaaggttttatgtcatcctccaaggaagtggctttctataga

SEQ ID NO: 79852 - DNA, 110 bp, synthetic construct
  source 1..110: mol_type = other DNA
gacacaaatgacctatctacaaaacagaaacaggtcatggatggcaaacttgtgtttgccaaggggggagggtggagagaggggtgctgacagggagttgggggttggca

SEQ ID NO: 79853 - DNA, 110 bp, synthetic construct
  source 1..110: mol_type = other DNA
tttgctgacagtcccccttagaagaccaaggttctttggtgtgaggttcctccgctgtgaggttaactcaccatgtgcatagtattgacctcgcactgctcttcatcatc

SEQ ID NO: 79854 - DNA, 110 bp, synthetic construct
  source 1..110: mol_type = other DNA
tgtgaggttaactcaccatgtgcatagtattgacctcgcactgctcttcatcatcccctgagacttcagaaacaggggaactcacgagaacacacagctctactgcctgc

SEQ ID NO: 79855 - DNA, 110 bp, synthetic construct
  source 1..110: mol_type = other DNA
agggcaaaatcttcacttttctttaataattgagcctcttactggcaggtcttccctttaatcaactaacaaaacaggagattgcccaaagagaaggcacaaaagatggg

SEQ ID NO: 79856 - DNA, 110 bp, synthetic construct
  source 1..110: mol_type = other DNA
aggctggatgtctcaactccatgtgactcgggtccttaaaaacaaacatcaaacccccccaaacacagaaaccaccatctagaaatagcaacaaaaacagacaaattatt

SEQ ID NO: 79857 - DNA, 110 bp, synthetic construct
  source 1..110: mol_type = other DNA
gagcaggaagagaaagaaatgacaagatatgcacaggggagaagtgagatctgtttttagccaaagcctaaaatgagagcacagtgataaggcaacaaggcaggaacagg

SEQ ID NO: 79858 - DNA, 110 bp, synthetic construct
  source 1..110: mol_type = other DNA
tttagccaaagcctaaaatgagagcacagtgataaggcaacaaggcaggaacaggtgggtcctgctcccatcagacaaacaagctccctccccaaatgcaaagcaaaaag

SEQ ID NO: 79859 - DNA, 110 bp, synthetic construct
  source 1..110: mol_type = other DNA
taattctcccaacaacctggtgatggaggtctttaaaggctgtttgagagacagtgaacctgaggttcgggtaacttgttcaagagcacagacagaataagagcgggatg

SEQ ID NO: 79860 - DNA, 110 bp, synthetic construct
  source 1..110: mol_type = other DNA
ccaattggtctcctgctctttgttgccaacaaccatctcagcttgggccagacatcatgaaaagatccagtaacagcatgatgcttcatgtggggggtccttccgtggtc

SEQ ID NO: 79861 - DNA, 110 bp, synthetic construct
  source 1..110: mol_type = other DNA
ctcacttggaacaagatgaacagactgtcagggtttcctccgcagggtccaccatgctgctggctccgggctgggctgtggggtgagtgcactggacggtttctacatca

SEQ ID NO: 79862 - DNA, 110 bp, synthetic construct
  source 1..110: mol_type = other DNA
agtaccatccgagagaccagcccctcacaatggaattcctgagcccgaggatggacgtatttgaaggcatctgacacattatgatgcttacccagctacttatattttat

SEQ ID NO: 79863 - DNA, 110 bp, synthetic construct
  source 1..110: mol_type = other DNA
cgtatttgaaggcatctgacacattatgatgcttacccagctacttatattttattcaaatttggtttcctggacattttgccagccaacatacatgtggttaagtcata

SEQ ID NO: 79864 - DNA, 110 bp, synthetic construct
  source 1..110: mol_type = other DNA
acatcacctttcctcaaggtcattaagactctgtatttgcttctttgtctcatgaagacaaaccacatggctctgatcttcatgggaaaaatgcaaatgagagcctcttc

SEQ ID NO: 79865 - DNA, 110 bp, synthetic construct
  source 1..110: mol_type = other DNA
tgtatgaagcaatacccaaggccaggggcacaaaccacaagagaggatcagaacgtgtagcatcgacatcgagcactcaacaaggatcaggtggagcactggcagggtcg

SEQ ID NO: 79866 - DNA, 110 bp, synthetic construct
  source 1..110: mol_type = other DNA
ggctggaaggttgctgctgctaaggcattttctgcagttgtgggcgcaagctaccatggccagggggctggtaccacctccactgttgccctggttccacctcctctaaa

SEQ ID NO: 79867 - DNA, 110 bp, synthetic construct
  source 1..110: mol_type = other DNA
atggccagggggctggtaccacctccactgttgccctggttccacctcctctaaatgtttcaaatgtgtcatctctccagcatccttttctgctgggcagaggaaacttt

SEQ ID NO: 79868 - DNA, 110 bp, synthetic construct
  source 1..110: mol_type = other DNA
aactgtttaacccttgtcttttctagaggactgtcttgagatctgatgagttcctatcagaatctagaattacctgtatattgctggtatttgaattagttttttaagct

SEQ ID NO: 79869 - DNA, 110 bp, synthetic construct
  source 1..110: mol_type = other DNA
ttgagatctgatgagttcctatcagaatctagaattacctgtatattgctggtatttgaattagttttttaagctagacagtcctatcatttctacattcatgccaaaaa

SEQ ID NO: 79870 - DNA, 110 bp, synthetic construct
  source 1..110: mol_type = other DNA
ccctggtaggttaaggattcagccttgctgctgccgtggctccagtttgatccttggcctgggaacttctgcatggtgtgggaaaggtcaaaggcattctttgggatcat

SEQ ID NO: 79871 - DNA, 110 bp, synthetic construct
  source 1..110: mol_type = other DNA
ggcctgggaacttctgcatggtgtgggaaaggtcaaaggcattctttgggatcatctcatcaggtagggagagccgtcggcacgcagttatttagatattgtaaagcacg

SEQ ID NO: 79872 - DNA, 110 bp, synthetic construct
  source 1..110: mol_type = other DNA
gctgttggaagggaaagcacataggttctgctaccctccctttctggaggtctgcttttcccacagacacagcagaacctagtatggtgctgagacccagcatctgttga

SEQ ID NO: 79873 - DNA, 110 bp, synthetic construct
  source 1..110: mol_type = other DNA
ttttcccacagacacagcagaacctagtatggtgctgagacccagcatctgttgacaaagagatggcaggtcagttgatcaagcggttgatagacagacttcattggagt

SEQ ID NO: 79874 - DNA, 110 bp, synthetic construct
  source 1..110: mol_type = other DNA
gagcagcagactaacaaccacgctgacttctctccttcaattaaggagtcctggtcttaaagggttgactcttactgcccaacagtcatgtttccccggtccatttatcc

SEQ ID NO: 79875 - DNA, 110 bp, synthetic construct
  source 1..110: mol_type = other DNA
cttaaagggttgactcttactgcccaacagtcatgtttccccggtccatttatcctctcttctctacgtgactgattctctcctccagtctccacccctccgccatcccc

SEQ ID NO: 79876 - DNA, 110 bp, synthetic construct
  source 1..110: mol_type = other DNA
tcgaacagacagaactaccatttgggtaacagctaccgcacagatctgtcccttagtgcccaagacaaggccacttgccctttgtattctactggggtggacgagatagg

SEQ ID NO: 79877 - DNA, 110 bp, synthetic construct
  source 1..110: mol_type = other DNA
ttgaaccagtgctctatcttcggcatttatctgcactccggagttaaaaattacacactgctagtacagacgctgcaggaagaggaggttagtctcccaaagtagtatgg

SEQ ID NO: 79878 - DNA, 110 bp, synthetic construct
  source 1..110: mol_type = other DNA
aaaaattacacactgctagtacagacgctgcaggaagaggaggttagtctcccaaagtagtatggaacataagcggctttcgacccgagagccctggcttttcaacctgg

SEQ ID NO: 79879 - DNA, 110 bp, synthetic construct
  source 1..110: mol_type = other DNA
ctgggacaaagtcagcctgttccctcagctgcctacgggcctcaggggccctctgggcatctccgctgtgtgcagcttccccgctacaagaaggtgtggcctcgttccaa

SEQ ID NO: 79880 - DNA, 110 bp, synthetic construct
  source 1..110: mol_type = other DNA
ggcatctccgctgtgtgcagcttccccgctacaagaaggtgtggcctcgttccaaagaggattccagggagttcccgtcgtggctccacagtaacgaacctgactaggat

SEQ ID NO: 79881 - DNA, 110 bp, synthetic construct
  source 1..110: mol_type = other DNA
tctggaaaacatctgcacactcatgaaaggagagtaaaaatggaaaaatgacaccttcatatgacgaggcagagttttgcccatgcagatccccggaaagggtggccgca

SEQ ID NO: 79882 - DNA, 110 bp, synthetic construct
  source 1..110: mol_type = other DNA
ttcatatgacgaggcagagttttgcccatgcagatccccggaaagggtggccgcaagccccaggcaggggcgtgctgggaaatgtttcacaatctgctccccttggggag

SEQ ID NO: 79883 - DNA, 110 bp, synthetic construct
  source 1..110: mol_type = other DNA
gcttcagtttgtcttgctttttgttcaacccatccgagatccaggttttcctctgcaagtggattttgttatcaccagttgtcctgtttgctgctggcctcatgcttttt

SEQ ID NO: 79884 - DNA, 110 bp, synthetic construct
  source 1..110: mol_type = other DNA
caagtggattttgttatcaccagttgtcctgtttgctgctggcctcatgcttttttgcaactacctcatcacatctgatgccatccttccacaaaagctccctctgcaag

SEQ ID NO: 79885 - DNA, 110 bp, synthetic construct
  source 1..110: mol_type = other DNA
taaatgatgagggtcctgacctcaggcaaaggcagtgagtcaggccttttctgcctccccaggatacacttaattgagtgacttgatgcctgcagcagccagcatgtctg

SEQ ID NO: 79886 - DNA, 110 bp, synthetic construct
  source 1..110: mol_type = other DNA
tccccaggatacacttaattgagtgacttgatgcctgcagcagccagcatgtctgcctggctgtccattcagccagtgaaccttcctccctttctttgcgtccttagact

SEQ ID NO: 79887 - DNA, 110 bp, synthetic construct
  source 1..110: mol_type = other DNA
actaaactagccctagctaaaaaatctctggctttgcaaaaccaaatttaaaaagatcaaactgttttcaagtaacctgatggcatccaagaacaaagctcaaaaacatt

SEQ ID NO: 79888 - DNA, 110 bp, synthetic construct
  source 1..110: mol_type = other DNA
ctaacaatgtggaagtggctgtggaattaactaatgggtagaagtgtgaggaaaaagaggagaacaacaggaaaagcccaaaatgccttgaacacggatgttaaggacac

SEQ ID NO: 79889 - DNA, 110 bp, synthetic construct
  source 1..110: mol_type = other DNA
agaggagaacaacaggaaaagcccaaaatgccttgaacacggatgttaaggacactggtagtgaggactcagacgcaaaagaggagcatggtcccaaagacattctacga

SEQ ID NO: 79890 - DNA, 110 bp, synthetic construct
  source 1..110: mol_type = other DNA
gacgggggaggtgaagagatggcctcggcttgtccaaggtcacagagctgctacgtgttagagctggaactgacacttggtctaattccagagtccacagcctcacaccg

SEQ ID NO: 79891 - DNA, 110 bp, synthetic construct
  source 1..110: mol_type = other DNA
gtcagggatcgaacccgtgtcctcatggatgctggttggatttgtttctgctgagccacattgggaactcccagaactcctgcctaggctctcaccaccagacacctgat

SEQ ID NO: 79892 - DNA, 110 bp, synthetic construct
  source 1..110: mol_type = other DNA
ccacattgggaactcccagaactcctgcctaggctctcaccaccagacacctgatcttcctgagccctggcctctgactgtcatttctcccgccctagcctgtgactgtg

SEQ ID NO: 79893 - DNA, 110 bp, synthetic construct
  source 1..110: mol_type = other DNA
cttaacccactgtgtcatacggaatctctgttaaccttttttttttctttttagggccgcgcctgcagcatatggaagttcctaagctaggggtcgaatctgagctgcag

SEQ ID NO: 79894 - DNA, 110 bp, synthetic construct; identical to SEQ ID NO: 79893
  source 1..110: mol_type = other DNA

SEQ ID NO: 79895 - DNA, 110 bp, synthetic construct
  source 1..110: mol_type = other DNA
gctctcagggaaagaagagaagcgcagctgaaaaaaagaaggaagatctaagacggctttgtgcccccatatgggtggtctctggaaagaaaataatgcagagaaaggtc

SEQ ID NO: 79896 - DNA, 110 bp, synthetic construct
  source 1..110: mol_type = other DNA
aaagaagagaaaacgaggaacagaatttgctcaatattttgcagcgccttctcacccattccccaatctgatcagagctggttgaaccataggtggatgcaagagccatg

SEQ ID NO: 79897 - DNA, 110 bp, synthetic construct
  source 1..110: mol_type = other DNA
tgatgctacgctgtccccctcgcaggctcaggaggggtgcgttcaagcgacaccgcacaaggaattcttctgcgtcaaccaggagatggctgcgcaaaggctagtttaca

SEQ ID NO: 79898 - DNA, 110 bp, synthetic construct
  source 1..110: mol_type = other DNA
gtaaaagcgatctggctccatcctcctccctggttcccaggccagaaggcaacactcttggtataaacctccccctcattctctgaatgccaagatgataaggaccctct

SEQ ID NO: 79899 - DNA, 110 bp, synthetic construct
  source 1..110: mol_type = other DNA
gcgtggacataacaatagcatagcctatttatatctgccttgcacctcaagcttccaaagagcccaccttcccaccctccttctcagtttaggcatcacctccaccagga

SEQ ID NO: 79900 - DNA, 110 bp, synthetic construct
  source 1..110: mol_type = other DNA
gtctttggcgccctaatgtttgtccctgtgcggtgcgtcccgtgacccccagtcagaaggagggagtattctgctctcacagtgtccatcacactaagcacgttcaattc

SEQ ID NO: 79901 - DNA, 110 bp, synthetic construct
  source 1..110: mol_type = other DNA
gaaggagggagtattctgctctcacagtgtccatcacactaagcacgttcaattccctggtgtcattttttcattcctgttttcattcattcctcaaatatttgctgagc

SEQ ID NO: 79902 - DNA, 110 bp, synthetic construct
  source 1..110: mol_type = other DNA
ggtggaatcctccccgtcgagctgagtgacagtggtgacggtcactggatggactccctgacgtgaaaacccgccaagtctctggatttggtctgaatgttcagaacttc

SEQ ID NO: 79903 - DNA, 110 bp, synthetic construct
  source 1..110: mol_type = other DNA
cccctctctgtgcacagatagacatggggacggtaagtgcgatgtggtggattaagagtggaaaagccacagcccttgtcctcaaggagcaggcagtcaggtggggacag

SEQ ID NO: 79904 - DNA, 110 bp, synthetic construct
  source 1..110: mol_type = other DNA
gagtggaaaagccacagcccttgtcctcaaggagcaggcagtcaggtggggacagtgaggtgcggcctgtgagcagtgagcccaccctgttttctagccaagggtgtggg

SEQ ID NO: 79905 - DNA, 110 bp, synthetic construct
  source 1..110: mol_type = other DNA
ttacagggagaagtcaagtaatgcagctacttcgagatccttcattcccggaggctgcggaaggttcagcaacagcttaagacatcctgctttttctcctacagaaaagc

SEQ ID NO: 79906 - DNA, 110 bp, synthetic construct
  source 1..110: mol_type = other DNA
tgcggaaggttcagcaacagcttaagacatcctgctttttctcctacagaaaagcacccacattgctgcccagctgcttgcgtgctctgagacttcagttctgtgccccc

SEQ ID NO: 79907 - DNA, 110 bp, synthetic construct
  source 1..110: mol_type = other DNA
cgtccctttgacttgcacctcggctgtctggggccggcgtccggtgctctcatcctggggccctcagggcctctctgggggtggcggcctcctggtcccatcctgtgtcc

SEQ ID NO: 79908 - DNA, 110 bp, synthetic construct
  source 1..110: mol_type = other DNA
ggccttcctcctggtttcagatttctcgttgtgctctcacagggccagagagacttgggatctctctggagcgtctttcgtaagggcactaatcccttacatgaggattc

SEQ ID NO: 79909 - DNA, 110 bp, synthetic construct
  source 1..110: mol_type = other DNA
cccgtcttccccacctgcagagctgcggtgggggccagagacgctgcttaaataaaatgtgtggaagggacctgcactcgccagggctcctgaaatatccgcttccgata

SEQ ID NO: 79910 - DNA, 110 bp, synthetic construct
  source 1..110: mol_type = other DNA
taccctccacagcagggtgggcctcacccaaacagttgaaggccttaagagcaaagaccgaggttttggagtgcccgtcatgactcagcaggttaagaacccaacaaagt

SEQ ID NO: 79911 - DNA, 110 bp, synthetic construct
  source 1..110: mol_type = other DNA
ttgtcctgtacgcagaggtgatgggaggctaacaacctgtcggtcatgggcccatcagcacaatgtccaccccgggtggaactgtccgcagccccccagacttcccccct

SEQ ID NO: 79912 - DNA, 110 bp, synthetic construct
  source 1..110: mol_type = other DNA
cagcacaatgtccaccccgggtggaactgtccgcagccccccagacttccccccttctttgctgcctacctagccattgatttgctggcggatgatgcttggcccaaggt

SEQ ID NO: 79913 - DNA, 110 bp, synthetic construct
  source 1..110: mol_type = other DNA
tttaattaattctaactgaaaacagtttacttctctcctttgatttccctaatctagaatttccataaagctctttagcagggacactgtccacaagctgaaagccaatc

SEQ ID NO: 79914 - DNA, 110 bp, synthetic construct
  source 1..110: mol_type = other DNA
gaatcacccaagatcacacagctgataatggaaaagttgagctgtctgagaggtgagcctgtgatttacagttggaagatggagcgaaacagaagaatgtataaaaagac

SEQ ID NO: 79915 - DNA, 110 bp, synthetic construct
  source 1..110: mol_type = other DNA
tttttatggctgcacccacagcatacggaagttcttgggccagagactgaatttgagttatagctgtgacttacatcgtacctacggcaatgctggatcccactgcacca

SEQ ID NO: 79916 - DNA, 110 bp, synthetic construct
  source 1..110: mol_type = other DNA
aaaatacatggttccattcgtatccatccactgacccctggcactagaatactatgtaaacttgtatgacttctgcttccacaaagaagcagcaccttacattagtccga

SEQ ID NO: 79917 - DNA, 110 bp, synthetic construct
  source 1..110: mol_type = other DNA
acaaaagaatgaacgtgggatacactggtcgccctggaacaaagctacggtggtccttaaaggaaagcaatgcattaaacacgagataaggaagtaggagtgagggaata

SEQ ID NO: 79918 - DNA, 110 bp, synthetic construct
  source 1..110: mol_type = other DNA
acaggaatatcttagttgtaacatgctatgtaaaaggacacttcaggctttgccgtttatcacgggaagctttgtagagttattacacagtctttgttgccatttttaaa

SEQ ID NO: 79919 - DNA, 110 bp, synthetic construct
  source 1..110: mol_type = other DNA
tgaatgcaaataataaagccttacccggactcggaactcaggagagaggagtcagttgcgctagctgttgaatgaatccagacccaaaaaatgggaggagatagttgaag

SEQ ID NO: 79920 - DNA, 110 bp, synthetic construct
  source 1..110: mol_type = other DNA
ttgcgctagctgttgaatgaatccagacccaaaaaatgggaggagatagttgaagactataattaatgtgtgatcaatgcaggggtcttatagagcaaggaacgcagagc

SEQ ID NO: 79921 - DNA, 110 bp, synthetic construct
  source 1..110: mol_type = other DNA
agatcataatattccataactatgagtcaaaaaacaaggatattggggttcccgctgtggctcagctgtgacgaatccaactagtattcatgaagatgtaggttcgatcc

SEQ ID NO: 79922 - DNA, 110 bp, synthetic construct
  source 1..110: mol_type = other DNA
accgagcttggatttggcattaagaactctgccaagacaggcactgatgggacccttggggacgacggaagaaggtgtaggatcgtatgtgccacagaagtaactcgcat

SEQ ID NO: 79923 - DNA, 110 bp, synthetic construct
  source 1..110: mol_type = other DNA
tgtgatggatcagactttactttccatattgagtttacatcactgcttccttcggttctttgttttagtttttgccttaaaatcaagtatttgtaagctttgcttgaacc

SEQ ID NO: 79924 - DNA, 110 bp, synthetic construct
  source 1..110: mol_type = other DNA
ttgaccatacaggtgaaggcttatttctgggttctctaatctgttctcttcttctgcatgttgttaggacagttctacaccacttaaatcaccataacttcaaaatacat

SEQ ID NO: 79925 - DNA, 110 bp, synthetic construct
  source 1..110: mol_type = other DNA
gcatgttgttaggacagttctacaccacttaaatcaccataacttcaaaatacattctgaaataagaaattgtgacacctctaacattgttattctttttccagagtatt

SEQ ID NO: 79926 - DNA, 110 bp, synthetic construct
  source 1..110: mol_type = other DNA
ggcaggtggtcttgatatcacagcttctgttctggtaaaatatccacttcctgcctccgtatgcctttcccatgggctatgtgtcacctctgcgcacctttgcgtggttc

SEQ ID NO: 79927 - DNA, 110 bp, synthetic construct
  source 1..110: mol_type = other DNA
ccctctcctctctcggagagggagctcagggcacagatcacagctctgtggaattgaacctttgtaatctagactcactgcctcctacccatggctgatccttggcgttt

SEQ ID NO: 79928 - DNA, 110 bp, synthetic construct
  source 1..110: mol_type = other DNA
tacacgggctgaggagtaagaagcatgtgaatacaacatgtctgcacctgacaaattggtaggagacctgctgtgacccagctgcaggtcacagaaaatgcacgctcacc

SEQ ID NO: 79929 - DNA, 110 bp, synthetic construct
  source 1..110: mol_type = other DNA
agcaaggaagaagtagaaaagtaattgcacagttatatgtaattttagagatacagagatgccaagtacttctgttttatcagaataacatcatcaagcaaagcaaccgg

SEQ ID NO: 79930 - DNA, 110 bp, synthetic construct
  source 1..110: mol_type = other DNA
tgcggctgtgcgaagggcttgctgagcaggaacaggagaagcgggaatattctagacagggattaaagtttttaataagctctgaaagcaaggagccacatgagcagccc

SEQ ID NO: 79931 - DNA, 110 bp, synthetic construct
  source 1..110: mol_type = other DNA
ttcaaacgggggatgggttttatttggcaatagtaattaaaaacagcttttggtgctgaaatatcccacgggagagggaagagttctacggccactttggaaaacacaag

SEQ ID NO: 79932 - DNA, 110 bp, synthetic construct
  source 1..110: mol_type = other DNA
ctgaaatatcccacgggagagggaagagttctacggccactttggaaaacacaagtctactcaacttggagtaactgggggttaatcctcattatccacacatgagaaag

SEQ ID NO: 79933 - DNA, 110 bp, synthetic construct
  source 1..110: mol_type = other DNA
agtgctaataagccttttccaacccctcattcttgatgtgttggcctgtcctgaggtgagctgtatgagcttggacctcgtacgttctgttttcctgattttctttattg

SEQ ID NO: 79934 - DNA, 110 bp, synthetic construct
  source 1..110: mol_type = other DNA
gtgagctgtatgagcttggacctcgtacgttctgttttcctgattttctttattgtttacttctctttactatgcttttcacaaatgatgaatagaaattttgaactagc

SEQ ID NO: 79935 - DNA, 110 bp, synthetic construct
  source 1..110: mol_type = other DNA
gtccagccctaacactatcttctaattgtttgtacatcagcaccagagctcgctccttacatcccgacaggtggatgaaagcctcctgctgggtgaatctgcacttctct

SEQ ID NO: 79936 - DNA, 110 bp, synthetic construct
  source 1..110: mol_type = other DNA
cctctgtgacccagggagctgggactggtaaattgattgcggtctgtatggaaaacaccggccggccaacatgctcattcttgtctggagaggggtggctaagaatccac

SEQ ID NO: 79937 - DNA, 110 bp, synthetic construct
  source 1..110: mol_type = other DNA
caccggccggccaacatgctcattcttgtctggagaggggtggctaagaatccaccgtgtcaactctggagggagagagatggcaattttaacgtctacaccagagagga

SEQ ID NO: 79938 - DNA, 110 bp, synthetic construct
  source 1..110: mol_type = other DNA
attttcagctgactatttagctcattgcttctgaaaaacgtttaatatgcaaggagggagactgtgtggtgatacacacccttgaataaaaagagcaccctctctctgca

SEQ ID NO: 79939 - DNA, 110 bp, synthetic construct; identical to SEQ ID NO: 79938
  source 1..110: mol_type = other DNA

SEQ ID NO: 79940 - DNA, 110 bp, synthetic construct
  source 1..110: mol_type = other DNA
cattttaacaacttcagagtagcttagtgagttgcagtgacagcatgctcagagtgtaccttctcactcaaactgaaagaaggaattgatgaaatctataaagcattcca

SEQ ID NO: 79941 - DNA, 110 bp, synthetic construct
  source 1..110: mol_type = other DNA
atacaatctaatgcaggtaaatatgttttagttatcatctatacgttttaacactggaccgaagccttctctcgcagacagaattctaaactgcagctgaagtccgttta

SEQ ID NO: 79942 - DNA, 110 bp, synthetic construct
  source 1..110: mol_type = other DNA
ggaccgaagccttctctcgcagacagaattctaaactgcagctgaagtccgtttagaaaggatcatccctcttgaactttacaatgatggatgaacccattccactggct

SEQ ID NO: 79943 - DNA, 110 bp, synthetic construct
  source 1..110: mol_type = other DNA
gattggagagctaacaagatagggagacgcaactggatgtgttttgggagaggattcagaaaatacagataagcccagcttttagtgctgatatttggccgtgggatttt

SEQ ID NO: 79944 - DNA, 110 bp, synthetic construct
  source 1..110: mol_type = other DNA
tcagaaaatacagataagcccagcttttagtgctgatatttggccgtgggatttttcttgttccagagtggacaactgcaaggttaagagggtaaatagaagtaacgaca

SEQ ID NO: 79945 - DNA, 110 bp, synthetic construct
  source 1..110: mol_type = other DNA
tcttccttcctcatttctggggatgcaaggccatccggggcttcctctgacattaagcctgcacccggagctccaggctcagagcccgtttctctcagctctcgcagcgt

SEQ ID NO: 79946 - DNA, 110 bp, synthetic construct
  source 1..110: mol_type = other DNA
atacaggatttcgggtggcttctcagcctgattattcctatttgtagtctattatcttatccagcttttttttctagagagagtggagggtaaagatgaagaaatgtatg

SEQ ID NO: 79947 - DNA, 110 bp, synthetic construct
  source 1..110: mol_type = other DNA
tgggatgtttgaattttctttagtataagcagaagccctcagctgagtctaaaaacaacccaggatagtccgtctttcctgggactgcagagctggtcccatttcatacg

SEQ ID NO: 79948 - DNA, 110 bp, synthetic construct
  source 1..110: mol_type = other DNA
ttaccatatctgagtgtatctcaaagcccatagatgactgtcagctctaaggtagggttctggacccctagatttgtgaatgtaggaacttcccaattgcaaggcttgtc

SEQ ID NO: 79949 - DNA, 110 bp, synthetic construct
  source 1..110: mol_type = other DNA
actgacaagctttgcaaacaaaactacatttcttcccccaaagcagaagagaccgagggggagaggcaaattcctcctcccagagcgggggtgggggtcagagtcaaccc

SEQ ID NO: 79950 - DNA, 110 bp, synthetic construct
  source 1..110: mol_type = other DNA
tccgacaggctgcacatccagcaaatgaagatgtaggattgtgaaattttgtgtacccaaaacgtatgacgttttgaacttagtgaattggacttttaaaaaacattaag

SEQ ID NO: 79951 - DNA, 110 bp, synthetic construct
  source 1..110: mol_type = other DNA
acaactaggtagattaattcacaaggaggttgagagatttaagtgagattatctggtgttatcaagctcagaaaaagcatcgaaaacgcaacacctctatttagaatgga

SEQ ID NO: 79952 - DNA, 110 bp, synthetic construct
  source 1..110: mol_type = other DNA
agtgaaaagacaggcagcgatggctggaggacgcttgagggtggaccatttagcaaatgagtacattattagctttgcttcacatcttgcattgccctgaagctcactca

SEQ ID NO: 79953 - DNA, 110 bp, synthetic construct
  source 1..110: mol_type = other DNA
agaattgtggaatctctcaaccagtttctggacgtctcacaaggagaactgccggtgtgcagctgatgcagcggggcacagcgagggcagggagcagcagagccttccac

SEQ ID NO: 79954 - DNA, 110 bp, synthetic construct
  source 1..110: mol_type = other DNA
gcacccaacagacacgcccaggagcagtgacttacctgctggccgggcaccccgtgtcagtccaggtgaggtgaagtgagccatcccagcatgattggggggtgactctt

SEQ ID NO: 79955 - DNA, 110 bp, synthetic construct
  source 1..110: mol_type = other DNA
agcatttatgctgcaattagttctaaagattttgggtagacggtcttttagctttatttgtggcgtttttgtcatatttaaaaatacatgtgttcacacctatcttttat

SEQ ID NO: 79956 - DNA, 110 bp, synthetic construct
  source 1..110: mol_type = other DNA
gcacaagcaggtgaatgggtctgtggcccgggagctggctgcacttcggcaaatctcttcccattaacatgcatcgtgtaagtgggagatgactctaaatcaacccggga

SEQ ID NO: 79957 - DNA, 110 bp, synthetic construct
  source 1..110: mol_type = other DNA
ttccttttttcttctgtcccaaggccattaaccagtgataaactgtcctgtacgtaactatgccatattagccaccagctgtcttgcccaaagttggaactaaatggcta

SEQ ID NO: 79958 - DNA, 110 bp, synthetic construct
  source 1..110: mol_type = other DNA
cccgcagggctgccttgtatcaagtgtgagctaatcccctggagaatgtgatcaagaaagtgggggctagagagagggttttgcccaaggaagctgaaagccagcctgtc

SEQ ID NO: 79959 - DNA, 110 bp, synthetic construct
  source 1..110: mol_type = other DNA
caaacgttaattatgaatgtcctgtgtcaccaagaatatgctagggcaatacatacacagagataattaagaagtagtcttcgtcccaaagaaaatcttgtatagaggga

SEQ ID NO: 79960 - DNA, 110 bp, synthetic construct
  source 1..110: mol_type = other DNA
cacagagataattaagaagtagtcttcgtcccaaagaaaatcttgtatagagggaaaaacaacatcaaagtgaccaagggccctatcaagagctggggagaaggggtgag

SEQ ID NO: 79961 - DNA, 110 bp, synthetic construct
  source 1..110: mol_type = other DNA
gaagcgggtcaaaacatcaggatacaaaacagcctgccgaacgatccaattgcataaaaaatcggaatgaacatccctgcagctaaacattaggaaaagaaaaaatccct

SEQ ID NO: 79962 - DNA, 110 bp, synthetic construct
  source 1..110: mol_type = other DNA
tgcctttgggtccagaaggtaatagaaaaaaacagggtaacagggtgcaataatgtggtagaaggaattatgaaaagtactttaggttttaatcgatgcctgaatttttt

SEQ ID NO: 79963 - DNA, 110 bp, synthetic construct
  source 1..110: mol_type = other DNA
ctgggaaaaacacagagttctcaacgtgtttgtccaccagtcaatagctcaccaacggacagacacgtggatcaaaggaacagaccacatcacggggctcaacggatttt

SEQ ID NO: 79964 - DNA, 110 bp, synthetic construct
  source 1..110: mol_type = other DNA
gaccaaaggctaaaaaataaatgcatacggatccaacgtagacactttcagaggcggcggcagtaattgggtctattcacaactaggttaatgatttccaaaagcctaaa

SEQ ID NO: 79965 - DNA, 110 bp, synthetic construct
  source 1..110: mol_type = other DNA
tcccagctgcgcccggggagagcctgagcccgccccttctccgtggcaggggctgggcttgaggcctcgcaagaaatcgggctcactgtgggaagaaaaaactggagaaa

SEQ ID NO: 79966 - DNA, 110 bp, synthetic construct
  source 1..110: mol_type = other DNA
tgctagaggtgggagtccttatttcagatgatttcaagggtgcttgacgggacctgaaggaccctgggacttgagtgcatctcagaggccagggggcgcctctgccgcca

SEQ ID NO: 79967 - DNA, 110 bp, synthetic construct
  source 1..110: mol_type = other DNA
gaaggaccctgggacttgagtgcatctcagaggccagggggcgcctctgccgccaggccagcctctgacccgccctgggatcccgaggtgctcagagaagttggggccac

SEQ ID NO: 79968 - DNA, 110 bp, synthetic construct
  source 1..110: mol_type = other DNA
aggaagagttttcactcccccagcttgagaaaaaggcaggcgccctccttccctccgtggaccgattcctcggtcatcagcagctgatccgcgcgggcgcgtggggcctc

SEQ ID NO: 79969 - DNA, 110 bp, synthetic construct
  source 1..110: mol_type = other DNA
ggaaggagagggcagagatcattttggagttgtggatgttttttttctaacccataggctcttttcttctctttagaacatgctgttaatgttttcttatttattctgta

SEQ ID NO: 79970 - DNA, 110 bp, synthetic construct
  source 1..110: mol_type = other DNA
tactttttttttttttaatgtcatcctgttgttagaagagcgggatttcccgtcaagcagcatgttatacacaccttctaagaccatggaaaagtgggggtcacctgggt

SEQ ID NO: 79971 - DNA, 110 bp, synthetic construct
  source 1..110: mol_type = other DNA
ctctgtgcacctttcatccagctcccgagtggcagtatctcctgcatcaggaccggggtgttggcatggatgcaggatgcaggcacagagcatccctttccacagggcct

SEQ ID NO: 79972 - DNA, 110 bp, synthetic construct
  source 1..110: mol_type = other DNA
attttacaggcgtgatgctgagtgagcgaagccagacaccagaaaagagctccatgtcacatattaactgagaataaaccagatctgtggggacggggctgcacatgctc

SEQ ID NO: 79973 - DNA, 110 bp, synthetic construct
  source 1..110: mol_type = other DNA
gaaagggagacgagccagtggaatggtgggaattccacaaagctggagccatgttctcgcctcaactaccttgaatggaccttatctggaaacagactcaatgcaggtgt

SEQ ID NO: 79974 - DNA, 110 bp, synthetic construct
  source 1..110: mol_type = other DNA
ttgatttccagtagcgcgctgaagtcggctctacggcaaatcccattcactcctcttcttgtggaacctgtccctaagaaaaaacgatgctttgatgctgtatttctcca

SEQ ID NO: 79975 - DNA, 110 bp, synthetic construct
  source 1..110: mol_type = other DNA
ttcttgtggaacctgtccctaagaaaaaacgatgctttgatgctgtatttctccatgaccctcatgcattctgatgtattttaggatggagtctaacacagagcagtctt

SEQ ID NO: 79976 - DNA, 110 bp, synthetic construct
  source 1..110: mol_type = other DNA
tattttattttacttatttttctccttgctgatcaagcttctgacatactcggttaacaaccctgcttttcgtttttctgagaaacagaagccttttcaggggaaggtgt

SEQ ID NO: 79977 - DNA, 110 bp, synthetic construct; identical to SEQ ID NO: 79976
  source 1..110: mol_type = other DNA

SEQ ID NO: 79978 - DNA, 110 bp, synthetic construct
  source 1..110: mol_type = other DNA
cccttggtttggcttttgctggtgtctgttaatacttggcatctcttggctcatgatgcgtcactcccatctctgcccacccccactctgtcttcatatggtgccctctt

SEQ ID NO: 79979 - DNA, 110 bp, synthetic construct
  source 1..110: mol_type = other DNA
aaaaagccaaaaaacttattacccacataattagcattaaggacagctagattggaatggattagcatatcgcatagtaaacaccgccaccggacttttaagtgtgtatt

SEQ ID NO: 79980 - DNA, 110 bp, synthetic construct
  source 1..110: mol_type = other DNA
ctgttacatctgttgagccaggactcccaggctcaacaactgaccaccctctgagtctgatccactttctcatctcccttcctgccctgaggctccgtctgttcccttca

SEQ ID NO: 79981 - DNA, 110 bp, synthetic construct
  source 1..110: mol_type = other DNA
aaaaaaagaaaaatatttgcaggtttcacttgggtctcgtgactttgggcttccctaattattccttctcaaagagaagctgtatcttgaagttctttgtgtgagatcca

SEQ ID NO: 79982 - DNA, 110 bp, synthetic construct
  source 1..110: mol_type = other DNA
taattattccttctcaaagagaagctgtatcttgaagttctttgtgtgagatccactgtttttatgttgaaactctaagtgtgatatgaggtgtagggaagggatagtat

SEQ ID NO: 79983 - DNA, 110 bp, synthetic construct
  source 1..110: mol_type = other DNA
tgcagctctgattcagcccctagccttgggacctccatatgccgtggctgtggcttacaaagaacaaagaaaagtgtgaaaatgaatcacctccctctgaaggaaccagt

SEQ ID NO: 79984 - DNA, 110 bp, synthetic construct
  source 1..110: mol_type = other DNA
tacaaagaacaaagaaaagtgtgaaaatgaatcacctccctctgaaggaaccagtgggccaatgagagcatcatcatttaaatcagcatcttgaaactaacttcaacgac

SEQ ID NO: 79985 - DNA, 110 bp, synthetic construct
  source 1..110: mol_type = other DNA
aacaaagaatgaaatcatgccattggcagtaacgtggatggacctagaatgatcctactcagtgaaatcaggcagagaaagataatcatcatatgatatcccttatatgt

SEQ ID NO: 79986 - DNA, 110 bp, synthetic construct
  source 1..110: mol_type = other DNA
ggatggacctagaatgatcctactcagtgaaatcaggcagagaaagataatcatcatatgatatcccttatatgtggcatttaaaacaatgatacaaatgaacatattta

SEQ ID NO: 79987 - DNA, 110 bp, synthetic construct
  source 1..110: mol_type = other DNA
acttgacctgtcacccagctgttgcaacctgtttagatgacagcagccaggtggcttgtagaagtcaggcactgaatcagatcatcaaaaccctcccaaccaaaacaggc

SEQ ID NO: 79988 - DNA, 110 bp, synthetic construct
  source 1..110: mol_type = other DNA
ttgtagaagtcaggcactgaatcagatcatcaaaaccctcccaaccaaaacaggcaaggcactgacccttctcgaagaagtggtcattgatcgactcatttcttaaaaca

SEQ ID NO: 79989 - DNA, 110 bp, synthetic construct
  source 1..110: mol_type = other DNA
ggaggagcggagaacaactgggaggtttgctatgaaacgtacaatatcacgttcatatgtgccaggagttcaggagcttcagcaagtcaaggagggtacttttcctgtcg

SEQ ID NO: 79990 - DNA, 110 bp, synthetic construct
  source 1..110: mol_type = other DNA
tatgtgccaggagttcaggagcttcagcaagtcaaggagggtacttttcctgtcgtcatgccagcgggaacagcagtcccgtgacagtaactgcacgccaaggatcccgg

SEQ ID NO: 79991 - DNA, 110 bp, synthetic construct
  source 1..110: mol_type = other DNA
gtgtggtacttcctccgctgaagggaaattttcccttgacctggctctgacggcttttgggaattgggatcaacagatgatgctcagtgactctccacatcacattttgc

SEQ ID NO: 79992 - DNA, 110 bp, synthetic construct; identical to SEQ ID NO: 79991
  source 1..110: mol_type = other DNA

SEQ ID NO: 79993 - DNA, 110 bp, synthetic construct
  source 1..110: mol_type = other DNA
tcttttggcctggcgtcatatgcagttcctgggctaaggattagatctgagtttttgcaaccgactctgcagctgcaacaacgccagatccttaacccaatgtgctgtgc

SEQ ID NO: 79994 - DNA, 110 bp, synthetic construct
  source 1..110: mol_type = other DNA
ctggaagcacctctttttcacctggaaccggagctggaaagaatgcagggagctggactgttgagattccctgacttagggagtgcccgtcatggcgcagtggttaacga

SEQ ID NO: 79995 - DNA, 110 bp, synthetic construct
  source 1..110: mol_type = other DNA
tgacatcattcaattgcaatgctgtgctagtttcaagtacccttcctatgcatattaaaaccgaaccgctttgctggatacgtgaagattttatacattgtatatgttcc

SEQ ID NO: 79996 - DNA, 110 bp, synthetic construct
  source 1..110: mol_type = other DNA
taaaaccgaaccgctttgctggatacgtgaagattttatacattgtatatgttccctcagggtcgtttccattgtacgtttgggaatatattgactatcgtctcctctgc

SEQ ID NO: 79997 - DNA, 110 bp, synthetic construct
  source 1..110: mol_type = other DNA
agacgtggaaggtcttgtgtgggacagagccgggggtggtgagaagcagcctggttgagctaatgagggatgagcatgacttcagtccaaggtgattcttcctagaggtc

SEQ ID NO: 79998 - DNA, 110 bp, synthetic construct
  source 1..110: mol_type = other DNA
tgagctaatgagggatgagcatgacttcagtccaaggtgattcttcctagaggtcaaggtggtacccagaatgaaaaatctactgcttctgtttccagccccagcttgag

SEQ ID NO: 79999 - DNA, 110 bp, synthetic construct
  source 1..110: mol_type = other DNA
aagtctgttaatcaatggaaaccatgacagtggtgttagcgaccttggacttaaaaataatccacatgctctcttcagggagggaagggttttaagagaacattgtatca

SEQ ID NO: 80000 - DNA, 110 bp, synthetic construct
  source 1..110: mol_type = other DNA
aataatccacatgctctcttcagggagggaagggttttaagagaacattgtatcactgggtatggattgcagaactgaaacgtgtgtgcaaaaaagatacactttttttt

SEQ ID NO: 80001 - DNA, 110 bp, synthetic construct
  source 1..110: mol_type = other DNA
tgggggtcaggaaatcaacataagaatttccagggggaggcacaatttagccccctacagccatccaaagtcctgatgacaccaaatacagttaaaaagaaaatgaaatt

SEQ ID NO: 80002 - DNA, 110 bp, synthetic construct
  source 1..110: mol_type = other DNA
tatcaaaaatacatctgtatgtggagcaattctcacagaaaaccaactagaaataggcagaagttctcttatccaaccacagttgcaagaaagatccctgtataaatggg

SEQ ID NO: 80003 - DNA, 110 bp, synthetic construct
  source 1..110: mol_type = other DNA
ggcagaagttctcttatccaaccacagttgcaagaaagatccctgtataaatgggtaggatgaacgaaatgcatcaggacagaaatggtgccttgagagggagctgggaa

SEQ ID NO: 80004 - DNA, 110 bp, synthetic construct
  source 1..110: mol_type = other DNA
caaagaaatatgaaatcagttctttccactagaaaaataagacgctagtgtcacgacagtgtttattttcatacccacctgtcactgacaagcaaagatatcccttcagc

SEQ ID NO: 80005 - DNA, 110 bp, synthetic construct
  source 1..110: mol_type = other DNA
tctacctaaattttctatgcccctgtgttcccctccagtccctggctttcccattataatggcactcattaaaatatgcatctgttcttctcgaatgtccgtgttgtcat

SEQ ID NO: 80006 - DNA, 110 bp, synthetic construct
  source 1..110: mol_type = other DNA
ataatggcactcattaaaatatgcatctgttcttctcgaatgtccgtgttgtcattcacggggtcaggacgtgatccctagcaagaaaggaatcgtttgtatttgaaatt

SEQ ID NO: 80007 - DNA, 110 bp, synthetic construct
  source 1..110: mol_type = other DNA
acctggagagccgagggactcacaaagcagagtcgggccctgaacaccgcgctctcctcaacagccctactggatccaggctatggcaccctacttaagtccctctgaac

SEQ ID NO: 80008 - DNA, 110 bp, synthetic construct
  source 1..110: mol_type = other DNA
cctcaacagccctactggatccaggctatggcaccctacttaagtccctctgaacctaaggctctatctccagccttcaggagccgcccgcccggacggacccgcctcca

SEQ ID NO: 80009 - DNA, 110 bp, synthetic construct
  source 1..110: mol_type = other DNA
ggaactcctggtgcttatttatgatcagcacatgagtagcctctctcttttcactgaggactgtcctgcattccaaggccaaaggtacattcatggttgatgattagacc

SEQ ID NO: 80010 - DNA, 110 bp, synthetic construct
  source 1..110: mol_type = other DNA
gaggactgtcctgcattccaaggccaaaggtacattcatggttgatgattagacctcagagtggtgcctcttggactcatcttgattcctcccactgtgctttttatgaa

SEQ ID NO: 80011 - DNA, 110 bp, synthetic construct
  source 1..110: mol_type = other DNA
tgctgctggtgatgagaggagattgtggggtttgacttgttcacaaacactggttcagctgtcatgcgtagcatcactcagcatctgtgtacaaatgtaggaaagagata

SEQ ID NO: 80012 - DNA, 110 bp, synthetic construct
  source 1..110: mol_type = other DNA
cagctgtcatgcgtagcatcactcagcatctgtgtacaaatgtaggaaagagatacattttataaatcttaattattccttaggtttaaagaaaaccattgactgtcctt

SEQ ID NO: 80013 - DNA, 110 bp, synthetic construct
  source 1..110: mol_type = other DNA
cagctactgcagctggtagctgttggccgcatttgcaggcaggaagtgcgtgcactttgtgcgagctaaggtttcacaggaacgaattccctctcaaagtggggaaaacc

SEQ ID NO: 80014 - DNA, 110 bp, synthetic construct
  source 1..110: mol_type = other DNA
tttgtgcgagctaaggtttcacaggaacgaattccctctcaaagtggggaaaaccattctatctttgcaggcgtggaacccaggctgaaccaggccacacacagagccac

SEQ ID NO: 80015 - DNA, 110 bp, synthetic construct
  source 1..110: mol_type = other DNA
ttcctctatttgttgtcgtctcataaaagcaagctgttcgaatttgatcttctagttgcttccacagaattcaatacctatttcacattattttttcttaactctggatt

SEQ ID NO: 80016 - DNA, 110 bp, synthetic construct
  source 1..110: mol_type = other DNA
ttcttggttttgatctttgctgtgtttatttaagatgttaatgtaacaggaagctagcgaagtcttatgggaactctttgccgtccgtgcaactttttgtgagtctaatc

SEQ ID NO: 80017 - DNA, 110 bp, synthetic construct
  source 1..110: mol_type = other DNA
agcgaagtcttatgggaactctttgccgtccgtgcaactttttgtgagtctaatcttattttaaagtaaaagggttggcgttcccttcgcatctcagtggttaatgagcc

SEQ ID NO: 80018 - DNA, 110 bp, synthetic construct
  source 1..110: mol_type = other DNA
gccggcactttgagagagtccacaaaggtcagcatctctgaagctttggcagggcacctcctcgggggatgtgtagattgttacctttttaagcaggagcctgttcctcg

SEQ ID NO: 80019 - DNA, 110 bp, synthetic construct
  source 1..110: mol_type = other DNA
acctcctcgggggatgtgtagattgttacctttttaagcaggagcctgttcctcggtagatgtgtttcttggatgctcatagacctggtaccaccggttcgtacgggaac

SEQ ID NO: 80020 - DNA, 110 bp, synthetic construct
  source 1..110: mol_type = other DNA
gggagtggagagctggctgtttttatgcgaggactgtgtttggattctgattactaagtccctactgtaggtacaagagaggtggtggattttcgtgtagttagtatcga

SEQ ID NO: 80021 - DNA, 110 bp, synthetic construct; identical to SEQ ID NO: 80020
  source 1..110: mol_type = other DNA

SEQ ID NO: 80022 - DNA, 110 bp, synthetic construct
  source 1..110: mol_type = other DNA
ggctgcagactgtcactgatcagcgggtggcagctttggtaccaaatcggggcggggggccttctggggagggcggaggatgcctgctcacgctcgtgctcacagcccta

SEQ ID NO: 80023 - DNA, 110 bp, synthetic construct
  source 1..110: mol_type = other DNA
actgtgttcaccagttgaataaaagcacacttaacttttacaccaaatagagttgagcttctgacatcactgtagccagaggtgaagctaagaaaggcagagagttcaac

SEQ ID NO: 80024 - DNA, 110 bp, synthetic construct
  source 1..110: mol_type = other DNA
atcagataagtgtccacaagatacaaacagaatgtgtggcaattagtcattctttcatagtttttctctaccatctcatagtagattcagtcattggttacctgtaattc

SEQ ID NO: 80025 - DNA, 110 bp, synthetic construct
  source 1..110: mol_type = other DNA
ctctgggactgctatttccccaattaaagactcatcctgagggttaaaaggctgagagtcttgagctgcagcccactcatgctgcttctctcccaacatctggtgatgac

SEQ ID NO: 80026 - DNA, 110 bp, synthetic construct
  source 1..110: mol_type = other DNA
aaatgattatcactgggcactgggctaggagcttttcaggttttgttcacccttcccacagttctgcagggtatgtgttatacatcccatttcacagatgagcaaacaaa

SEQ ID NO: 80027 - DNA, 110 bp, synthetic construct
  source 1..110: mol_type = other DNA
ccacagttctgcagggtatgtgttatacatcccatttcacagatgagcaaacaaactgtcaaaggccaggctcctttccctcatccctcccaatctcacagatctcatgt

SEQ ID NO: 80028 - DNA, 110 bp, synthetic construct
  source 1..110: mol_type = other DNA
tgtacacctgaaattaatataaggtatatcaactatatctcaattttaaaaaaaagcaaaacaacagcctatcacaaaataacgtgggaaaaacagggaattatgggagc

SEQ ID NO: 80029 - DNA, 110 bp, synthetic construct
  source 1..110: mol_type = other DNA
gcaaaacaacagcctatcacaaaataacgtgggaaaaacagggaattatgggagcagcagagaactatgggaaagaagagaattatgaatgagacagagacttgcaggag

SEQ ID NO: 80030 - DNA, 110 bp, synthetic construct
  source 1..110: mol_type = other DNA
tgtagattcctgtatgtggcttggcaggggccatggtgagagagggcttccgtcaagcatgaggctgcaactaccagctcccggcaaatcgggacccttctcctcggcat

SEQ ID NO: 80031 - DNA, 110 bp, synthetic construct
  source 1..110: mol_type = other DNA
acctaaatcatggagctgcagctatactttcagcagtgagcagcctccatcgagtcttgtgaatgagataggttcccatcctggaaagcagcactgagattgtctggccc

SEQ ID NO: 80032 - DNA, 110 bp, synthetic construct
  source 1..110: mol_type = other DNA
ctgagagccacgtagctgtcatgttggagcacagacataaaatgccatgactcatggagccaatgatgagtcgaggtgagccacaaagcatgactgctgtttgctcttcc

SEQ ID NO: 80033 - DNA, 110 bp, synthetic construct
  source 1..110: mol_type = other DNA
ggagccaatgatgagtcgaggtgagccacaaagcatgactgctgtttgctcttccttatgtgacctcatgcctggacaccctgcatgccagcatggcccacagaagcata

SEQ ID NO: 80034 - DNA, 110 bp, synthetic construct
  source 1..110: mol_type = other DNA
ttacctgcgaagatcccatgcctttgcatctattttatttttttctcaaaacgcaaatgataagatgcctcatgaaaaaccacgtaggtgcatactgcagcagaatttct

SEQ ID NO: 80035 - DNA, 110 bp, synthetic construct
  source 1..110: mol_type = other DNA
aatgataagatgcctcatgaaaaaccacgtaggtgcatactgcagcagaatttctcactttgcacctctgttccaaccacagccagggacttaaatttagacactaattg

SEQ ID NO: 80036 - DNA, 110 bp, synthetic construct
  source 1..110: mol_type = other DNA
ggtggcacgggaaagggtccccagctcttggcttcgcgtatccccttgccaatacctggcccagagggaatgtgctggcaatgccattgggaacatgcatttcaaggtta

SEQ ID NO: 80037 - DNA, 110 bp, synthetic construct
  source 1..110: mol_type = other DNA
ctggcccagagggaatgtgctggcaatgccattgggaacatgcatttcaaggttaaaaccaaatcatgtgcatggcatgtcctccggcggacatttcctgctcgtgggaa

SEQ ID NO: 80038 - DNA, 110 bp, synthetic construct
  source 1..110: mol_type = other DNA
aacacaccctccagagtgaggaactttacctgaatccacaggaggaaatggggaaggatgttggttgatcctaaaatggcatcgccggtttccttcccacggctgcgctc

SEQ ID NO: 80039 - DNA, 110 bp, synthetic construct
  source 1..110: mol_type = other DNA
caaacatacacaaaattagacagtcatataatcaatcagtatgttcgtcacataccaattcatgtccagtcttattttctctttttttttttgatgcacctccttccaca

SEQ ID NO: 80040 - DNA, 110 bp, synthetic construct
  source 1..110: mol_type = other DNA
caattcatgtccagtcttattttctctttttttttttgatgcacctccttccacactgcatgtagaagcaaatcttagacatcatagcatttaatctttgaatctttcag

SEQ ID NO: 80041 - DNA, 110 bp, synthetic construct
  source 1..110: mol_type = other DNA
atactagtcaggtttttaactcgctgatccactgtgggcactctgagactctgagtgtctctaacatgctccctggtgctgctggtgctgttggcatcggagtgagctgt

SEQ ID NO: 80042 - DNA, 110 bp, synthetic construct; identical to SEQ ID NO: 80041
  source 1..110: mol_type = other DNA

SEQ ID NO: 80043 - DNA, 110 bp, synthetic construct
  source 1..110: mol_type = other DNA
atcaggttaggatacaaaataaagggtatttctcatgacttttttcatttgtgttaactgctttgttggcctgataccttctttttgcaaggaacacctttcttccctcg

SEQ ID NO: 80044 - DNA, 110 bp, synthetic construct
  source 1..110: mol_type = other DNA
aactgctttgttggcctgataccttctttttgcaaggaacacctttcttccctcgatgtagtccaccttgatgataattctaagaactttagtgttggctgtttggtcca

SEQ ID NO: 80045 - DNA, 110 bp, synthetic construct
  source 1..110: mol_type = other DNA
cccctttggtagccataagttaggtttcaaaatctttgagtccctctcttttgtaagttcttttgtattcttttttttacattctacatattactgatcccataggatat

SEQ ID NO: 80046 - DNA, 110 bp, synthetic construct; identical to SEQ ID NO: 80045
  source 1..110: mol_type = other DNA

SEQ ID NO: 80047 - DNA, 110 bp, synthetic construct
  source 1..110: mol_type = other DNA
tggctcatccctaggactggaggggaaaaggaaggataagatcctgctgccgagggtaattcgaggaacatgctcagctcatccccttctgggctttctccttttctctc

SEQ ID NO: 80048 - DNA, 110 bp, synthetic construct
  source 1..110: mol_type = other DNA
gtaattcgaggaacatgctcagctcatccccttctgggctttctccttttctctctctctcttcttctaccatgacgtaataagcccacctctgaaaaggatgctgacga

SEQ ID NO: 80049 - DNA, 110 bp, synthetic construct
  source 1..110: mol_type = other DNA
gctaggggtcaaattggatttgcagctgccagcttaggccacagccacagcaatgcagaatcccagctgcatctggcaattacaccacaactcacagcagtgctcgatcc

SEQ ID NO: 80050 - DNA, 110 bp, synthetic construct; identical to SEQ ID NO: 80049
  source 1..110: mol_type = other DNA

SEQ ID NO: 80051 - DNA, 110 bp, synthetic construct
  source 1..110: mol_type = other DNA
gctaatcccaaactcccagtccatccctcccgtaacctatcttcccctctggcatctattctccatgtccatgagtctatttctgatttgtagataggttcatttatgcc

SEQ ID NO: 80052 - DNA, 110 bp, synthetic construct; identical to SEQ ID NO: 80051
  source 1..110: mol_type = other DNA

SEQ ID NO: 80053 - DNA, 110 bp, synthetic construct
  source 1..110: mol_type = other DNA
tccttgctagcctgctaattaattcctccctttgcctaagataatcagaggttttttcttttttcttgcaatcacatgggggagggtgtaattttttttcataaaaggag

SEQ ID NO: 80054 - DNA, 110 bp, synthetic construct
  source 1..110: mol_type = other DNA
ttcttttttcttgcaatcacatgggggagggtgtaattttttttcataaaaggagcccatctcaaacttgcacattttattagttttgccttttataagcgaaggccttc

SEQ ID NO: 80055 - DNA, 110 bp, synthetic construct
  source 1..110: mol_type = other DNA
tccccatcaccgcttccattaccatcccacttccaccaccatcaccctcttcactcatctccgtcactgccatcactgtcaccgtcaccattatctccattagatgatga

SEQ ID NO: 80056 - DNA, 110 bp, synthetic construct
  source 1..110: mol_type = other DNA
catctccgtcactgccatcactgtcaccgtcaccattatctccattagatgatgatgactgatggtggtagcgagtgcacacagctctcaatacactgattgcagtacag

SEQ ID NO: 80057 - DNA, 110 bp, synthetic construct
  source 1..110: mol_type = other DNA
acggccaggggctggatgtaaggcaccagcgtcagtgggctccatcactcaggccaccctgttctgctcccccctaaaggagtgacagcatgtcaggaatgagggcaggt

SEQ ID NO: 80058 - DNA, 110 bp, synthetic construct
  source 1..110: mol_type = other DNA
accctgttctgctcccccctaaaggagtgacagcatgtcaggaatgagggcaggtcagaggaacaaagcatgggtggggcagtggacctataacctgaggtccctgaccg

SEQ ID NO: 80059 - DNA, 110 bp, synthetic construct
  source 1..110: mol_type = other DNA
tctcttgggccacttatgcttaggtaatattgcttaaactcagtttgatgctttaagaaccatatatgcgtgcatatgtgcacatgtgtgatagaaaaaatatctctaga

SEQ ID NO: 80060 - DNA, 110 bp, synthetic construct
  source 1..110: mol_type = other DNA
cataaaagcagttcgtttgcagtatggcttttgtgtagttaggggttttttaagtgtaaagaaaggtatgtgggctttaaaagtgattctaaatcttgaatggataatac

SEQ ID NO: 80061 - DNA, 110 bp, synthetic construct
  source 1..110: mol_type = other DNA
atttatattttattctctatcggaagtgttcacacaagtcttttctttttgaattgaaaacggcactttacacttgcacagaggtaaagatgaactccctacatagtgag

SEQ ID NO: 80062 - DNA, 110 bp, synthetic construct; identical to SEQ ID NO: 80061
  source 1..110: mol_type = other DNA

SEQ ID NO: 80063 - DNA, 110 bp, synthetic construct
  source 1..110: mol_type = other DNA
ccaaaagtgaactgagcttcccaaagtgtccatcttgcagttagctgacacttttacatgaggaacaactggtttagggggcaggtcttagcttcctcctgcatgtctta

SEQ ID NO: 80064 - DNA, 110 bp, synthetic construct
  source 1..110: mol_type = other DNA
acatgaggaacaactggtttagggggcaggtcttagcttcctcctgcatgtcttatagtatctgtggtcaaagtcacaatgctttagtaagttgagaccttatgtcacag

SEQ ID NO: 80065 - DNA, 110 bp, synthetic construct
  source 1..110: mol_type = other DNA
gcaattgtaaatgatattttgcttctaatttctgtctgcacatttttgtaatttttatttgaaaagtgactggttttgtgtgtcagtcttgtatcctacagtcttgctaa

SEQ ID NO: 80066 - DNA, 110 bp, synthetic construct; identical to SEQ ID NO: 80065
  source 1..110: mol_type = other DNA

SEQ ID NO: 80067 - DNA, 110 bp, synthetic construct
  source 1..110: mol_type = other DNA
atgtttctcaaggccatttacttccctccatttcaccgccaccactctggctcatgtcacctggacagctaccatagctgacttcactagtctccctggattcctcccgc

SEQ ID NO: 80068 - DNA, 110 bp, synthetic construct
  source 1..110: mol_type = other DNA
gttgtatttcccattgcaagatgctaaccacaagtcactctaacttctgaagactggtagcttctggagcttttctttttttatttttttggtcttttctaggaccactc

SEQ ID NO: 80069 - DNA, 110 bp, synthetic construct
  source 1..110: mol_type = other DNA
gcaagatgctaaccacaagtcactctaacttctgaagactggtagcttctggagcttttctttttttatttttttggtcttttctaggaccactcctgcagcatatggag

SEQ ID NO: 80070 - DNA, 110 bp, synthetic construct
  source 1..110: mol_type = other DNA
agtcgggttggttactgctgagccacaataggaactccgtgaatcaatgcttctctagcatttcctacatggcttgttctcctggtccatttcagctaacaagtgctttt

SEQ ID NO: 80071 - DNA, 110 bp, synthetic construct
  source 1..110: mol_type = other DNA
tagcatttcctacatggcttgttctcctggtccatttcagctaacaagtgctttttttaatgccctcatggagtacaggccaccaaatgtcctgaccaaattagttcaag

SEQ ID NO: 80072 - DNA, 110 bp, synthetic construct; identical to SEQ ID NO: 80070
  source 1..110: mol_type = other DNA

SEQ ID NO: 80073 - DNA, 110 bp, synthetic construct; identical to SEQ ID NO: 80071
  source 1..110: mol_type = other DNA

SEQ ID NO: 80074 - DNA, 110 bp, synthetic construct
  source 1..110: mol_type = other DNA
tcactctgaactttgaactaagcagaacctgggcaagaagggaaggcgtgtgacagaaccaagtcagagggtactctcctgctctccccctgcccctggagaattttcca

SEQ ID NO: 80075 - DNA, 110 bp, synthetic construct
  source 1..110: mol_type = other DNA
gaaccaagtcagagggtactctcctgctctccccctgcccctggagaattttccatattcagtgggtgactgcttcattccactgagtacaataccacttcttctgacca

SEQ ID NO: 80076 - DNA, 110 bp, synthetic construct
  source 1..110: mol_type = other DNA
cattccaaaggcaatggtcttaatctattaaccccaagttcccaatatatcctgctcccaccccttccccatggcaaccacaaatctattctcctagtccatgattttct

SEQ ID NO: 80077 - DNA, 110 bp, synthetic construct; identical to SEQ ID NO: 80076
  source 1..110: mol_type = other DNA

SEQ ID NO: 80078 - DNA, 110 bp, synthetic construct
  source 1..110: mol_type = other DNA
gagccaagcatagagaagaggagtggatgtgagaatttatgtaactggggtagtggatcagctgaactgaaattagaagtggggttgaaatttaactttactgccacttt

SEQ ID NO: 80079 - DNA, 110 bp, synthetic construct
  source 1..110: mol_type = other DNA
gatcagctgaactgaaattagaagtggggttgaaatttaactttactgccactttttgacacattcctttccttcagatagacaagctatgtaaaacatctatcacaatg

SEQ ID NO: 80080 - DNA, 110 bp, synthetic construct
  source 1..110: mol_type = other DNA
cttttcatgtgcctgttggccttctgtataacttctttggagaaatgtctatttttgattgggttgtttgtcttttgcaaatttcatttttgacaggaggttaatatcca

SEQ ID NO: 80081 - DNA, 110 bp, synthetic construct
  source 1..110: mol_type = other DNA
ttggccttctgtataacttctttggagaaatgtctatttttgattgggttgtttgtcttttgcaaatttcatttttgacaggaggttaatatccagaatacataaagaat

SEQ ID NO: 80082 - DNA, 110 bp, synthetic construct
  source 1..110: mol_type = other DNA
ctcaggcagtgaataagaaacaataatgtctttggcagacagagaaattatgtttaagctacactttctccttttaaaattcctttttctatgactcaactgacatgtag

SEQ ID NO: 80083 - DNA, 110 bp, synthetic construct
  source 1..110: mol_type = other DNA
aagctacactttctccttttaaaattcctttttctatgactcaactgacatgtagcttccaaaaaatgttaccaaagacatagtctgttagtaatatactatggagtcca

SEQ ID NO: 80084 - DNA, 110 bp, synthetic construct
  source 1..110: mol_type = other DNA
tcagcatctgagtgtgtttagttttgtaagaagccaccaaactgtcatacaaagtgactacaccattctgcattccaattagtaattaataagagttcctgttgtttcgt

SEQ ID NO: 80085 - DNA, 110 bp, synthetic construct
  source 1..110: mol_type = other DNA
gactacaccattctgcattccaattagtaattaataagagttcctgttgtttcgtagcatcaccagtatctgacactgtaaatgttctagacttgggtcgttctaattgg

SEQ ID NO: 80086 - DNA, 110 bp, synthetic construct
  source 1..110: mol_type = other DNA
aaatacacacacaaacatcccatcctgagttccatacatattcccccctgctcaattgtgcatcagcagccatatctccttccagttgaaggcaattacccctaccaaga

SEQ ID NO: 80087 - DNA, 110 bp, synthetic construct
  source 1..110: mol_type = other DNA
gaactatgaagataaaggcccttaaatgtgaaacacagatgactcactcagcaatgtaagtgaacaaaatgtgaaatagtggaacgtttgttcatgaaaacaaacttttc

SEQ ID NO: 80088 - DNA, 110 bp, synthetic construct
  source 1..110: mol_type = other DNA
cagcgaactcctagtgcatgtccttttgatcaagcttatcaattgtgttatttatattttctatactacgctactaagtttcggtctgtgtgacatcaattactgagaaa

SEQ ID NO: 80089 - DNA, 110 bp, synthetic construct
  source 1..110: mol_type = other DNA
attttctatactacgctactaagtttcggtctgtgtgacatcaattactgagaaagatttgttgtatcctatggtggtggtggacatgttgatttctcctcatgattctg

SEQ ID NO: 80090 - DNA, 110 bp, synthetic construct
  source 1..110: mol_type = other DNA
gtgttgggtttcattgaagactttgtattttttttttttttttgcggcggggggcgggggggttgttcatcatcctggaggcttttttctctgccagtcactttccctgg

SEQ ID NO: 80091 - DNA, 110 bp, synthetic construct
  source 1..110: mol_type = other DNA
tttctgacctagagggctcatgtttagtgagagtctcacagaccccaaagactggaggtatgtggctggttgatcttttgctctctgccattgtttacagggtccacaga

SEQ ID NO: 80092 - DNA, 110 bp, synthetic construct
  source 1..110: mol_type = other DNA
aggtatgtggctggttgatcttttgctctctgccattgtttacagggtccacagaagacaaattccagttatttaccttggtcctctgttacttctatctagacgttgat

SEQ ID NO: 80093 - DNA, 110 bp, synthetic construct
  source 1..110: mol_type = other DNA
taattttcttatggaactctatactgttttccgtagtggttgtaccagcttaccctcccatcagcagtgtaggagggttccctgttcttgacaccctttctagcatttgt

SEQ ID NO: 80094 - DNA, 110 bp, synthetic construct; identical to SEQ ID NO: 80093
  source 1..110: mol_type = other DNA

SEQ ID NO: 80095 - DNA, 110 bp, synthetic construct
  source 1..110: mol_type = other DNA
aaacagatacccacggaaacaaagattcaaacctttttataaaaagcacattgcaagtgaaattattccttaaaattttgaccttgcatagagatcatgagtaaactgct

SEQ ID NO: 80096 - DNA, 110 bp, synthetic construct
  source 1..110: mol_type = other DNA
tatgtgggtttatttaaagatctgaattctattccaatggcctgtatttctatcctaatgtcagtatcacactctatagattactataggcttgtagcacattttgaaat

SEQ ID NO: 80097 - DNA, 110 bp, synthetic construct; identical to SEQ ID NO: 80096
  source 1..110: mol_type = other DNA

SEQ ID NO: 80098 - DNA, 110 bp, synthetic construct
  source 1..110: mol_type = other DNA
caatcacatgatgtctatttagtgaattgtgaattatgaaaatccatgcttgcagataggcatacttttaaatgtgtcatcaactctacttggggattataaagtaggag

SEQ ID NO: 80099 - DNA, 110 bp, synthetic construct
  source 1..110: mol_type = other DNA
gtaaagaaagactttactgagtgactactgaagtaaggggagagggacagctgcactgggagacagtgcctaaaaccagaaacaactttaaagccaaaaccagaaataac

SEQ ID NO: 80100 - DNA, 110 bp, synthetic construct
  source 1..110: mol_type = other DNA
ttaactttttgaggaactgccagagcgttttctaaagtggctgccctactgcatcccaccagcaatttcagtttctccacatttttgccaatacctattttccactgttt

SEQ ID NO: 80101 - DNA, 110 bp, synthetic construct
  source 1..110: mol_type = other DNA
ccaccagcaatttcagtttctccacatttttgccaatacctattttccactgtttaggctatagtcaccctagtggatgtgaagtagtatctcattatgttcttttttaa

SEQ ID NO: 80102 - DNA, 110 bp, synthetic construct
  source 1..110: mol_type = other DNA
atgtaaatctgtttgggaaaaaaaggaggcggctcagtgaatgggtacctggcagacagcctgtcctccaaggttctttgctattccctctgaacccaaaggagcactct

SEQ ID NO: 80103 - DNA, 110 bp, synthetic construct
  source 1..110: mol_type = other DNA
acagcctgtcctccaaggttctttgctattccctctgaacccaaaggagcactcttgcttgaactagctgcttcgtaaaacattaatgtgcctgagcgtcaccagggatg

SEQ ID NO: 80104 - DNA, 110 bp, synthetic construct
  source 1..110: mol_type = other DNA
gctaataagtgacagggctgggagtagacccctggtccgaatttgtccagaactaacacctttccactttttccagcttggggctgaccattaatctgttacttcagttt

SEQ ID NO: 80105 - DNA, 110 bp, synthetic construct
  source 1..110: mol_type = other DNA
acacctttccactttttccagcttggggctgaccattaatctgttacttcagtttccgctatgcctccaaaatgtaacctgggagttctggacatggctcagtggaatca

SEQ ID NO: 80106 - DNA, 110 bp, synthetic construct
  source 1..110: mol_type = other DNA
ctgcatctggatatagtagactgtttgcaaagatgaccacaaaaattattcctaccactgaatgcataccctttgcaatataagtcttgacatactctgcagtgtagcta

SEQ ID NO: 80107 - DNA, 110 bp, synthetic construct
  source 1..110: mol_type = other DNA
cactgaatgcataccctttgcaatataagtcttgacatactctgcagtgtagctattcctcccatcaatagatagcatttcttttctcaccccttgaatattggtgcact

SEQ ID NO: 80108 - DNA, 110 bp, synthetic construct
  source 1..110: mol_type = other DNA
tctgaacaggccttccttagttttttccttttgtttttttctgtgcttcataaccaatacttccttctgccctactgcctggttatctagttctctctttagcagcatgc

SEQ ID NO: 80109 - DNA, 110 bp, synthetic construct
  source 1..110: mol_type = other DNA
aatacttccttctgccctactgcctggttatctagttctctctttagcagcatgcagtctgctctaagcccttacagtgagttttaaattttggttactgtactttttag

SEQ ID NO: 80110 - DNA, 110 bp, synthetic construct
  source 1..110: mol_type = other DNA
tgacccgagccactgccataacaacactggatccttaacctgctgggaactccccaatacatttttaaatggctaacaaaagctgttccgttatttttttcttgggttct

SEQ ID NO: 80111 - DNA, 110 bp, synthetic construct
  source 1..110: mol_type = other DNA
aatacatttttaaatggctaacaaaagctgttccgttatttttttcttgggttctcaggatggggaaactcaagtggaaactacataaaagtgagcgttaaaagagcttg

SEQ ID NO: 80112 - DNA, 110 bp, synthetic construct
  source 1..110: mol_type = other DNA
tgtatcacgcagaaaaaaaaaatcacaaaatcagctatgccagctacgtttcctttgtccctgaagacccagtccccctcagatttctccactgtccaaggggctggctt

SEQ ID NO: 80113 - DNA, 110 bp, synthetic construct
  source 1..110: mol_type = other DNA
tgtccctgaagacccagtccccctcagatttctccactgtccaaggggctggcttgtgggattacatcaatagtctcctacgtcctctggttttctggttttggatttga

SEQ ID NO: 80114 - DNA, 110 bp, synthetic construct
  source 1..110: mol_type = other DNA
ggtttaaaggcagctagatatgaatccaccatatctatctgtccctctctgtcatctcctaacaaatatgtatcagcactattttgtgtgggggctactttttctgaagg

SEQ ID NO: 80115 - DNA, 110 bp, synthetic construct
  source 1..110: mol_type = other DNA
ctcctaacaaatatgtatcagcactattttgtgtgggggctactttttctgaaggattttgtttccatgattatttcctgaagctgtcagtactactaccaagatgaatt

SEQ ID NO: 80116 - DNA, 110 bp, synthetic construct
  source 1..110: mol_type = other DNA
gtggaaaacaaggctagagattctctgtgtcaagcagccttcacttatcctggctcttgacccatgtggataagggataagtgtgtgtgtgctgggtgtttcttggccac

SEQ ID NO: 80117 - DNA, 110 bp, synthetic construct
  source 1..110: mol_type = other DNA
cttgacccatgtggataagggataagtgtgtgtgtgctgggtgtttcttggccactcaatgatgcaaagattccacgccagcatatctcctgtcttgtgtccttccatgc

SEQ ID NO: 80118 - DNA, 110 bp, synthetic construct
  source 1..110: mol_type = other DNA
tactgagtaaagattcctcaagatagaccccaacttcaatcaagtatagtgattctcaactggagaaagagaaatattattatcccttgaaagttcattaaattctagat

SEQ ID NO: 80119 - DNA, 110 bp, synthetic construct
  source 1..110: mol_type = other DNA
tcaactggagaaagagaaatattattatcccttgaaagttcattaaattctagatgaggcttccttaagcattccctactgcagacctgattaaattactcatattctac

SEQ ID NO: 80120 - DNA, 110 bp, synthetic construct
  source 1..110: mol_type = other DNA
acctgtggccccagtcacctcagaggtaggcaaaaaaagggggcagtgcaaccgagcaccacacactgatgctcttactcccatgggaacacacctgccctgctgttgcc

SEQ ID NO: 80121 - DNA, 110 bp, synthetic construct
  source 1..110: mol_type = other DNA
aaagggggcagtgcaaccgagcaccacacactgatgctcttactcccatgggaacacacctgccctgctgttgccactgtcaaatgctccaggaagtacccaaacattct

SEQ ID NO: 80122 - DNA, 110 bp, synthetic construct
  source 1..110: mol_type = other DNA
tgcagccaaaaataaaaaatgaaagagattaaaatgtacagagggaataattacaatttacttggaaatgtgactatgaaggagaaagagaaatgagacattggctagaa

SEQ ID NO: 80123 - DNA, 110 bp, synthetic construct
  source 1..110: mol_type = other DNA
aacccatgcacttatgttcatttaatctatatcaaaaacaacaggaatagttttcccgaatatttttgtgtcaaattttctgagctacctcttatactttaccttcacat

SEQ ID NO: 80124 - DNA, 110 bp, synthetic construct; identical to SEQ ID NO: 80123
  source 1..110: mol_type = other DNA

SEQ ID NO: 80125 - DNA, 110 bp, synthetic construct
  source 1..110: mol_type = other DNA
cttaacccactgagccacaaaagaacttctccactctgtctttaaacaagctttggtgaattgattccttctcacactttgagtctctctgacttctctttcttcagcca

SEQ ID NO: 80126 - DNA, 110 bp, synthetic construct; identical to SEQ ID NO: 80125
  source 1..110: mol_type = other DNA

SEQ ID NO: 80127 - DNA, 110 bp, synthetic construct
  source 1..110: mol_type = other DNA
gaagaaagcttctatcactctctctcactctcttgctcttcgccttgttttgccctcgctgtgatgtttctacttattagagaatttccaccaagtgtttatggtgatca

SEQ ID NO: 80128 - DNA, 110 bp, synthetic construct
  source 1..110: mol_type = other DNA
ctcttcgccttgttttgccctcgctgtgatgtttctacttattagagaatttccaccaagtgtttatggtgatcatgagttttgaacaacagagggacccagggaaagaa

SEQ ID NO: 80129 - DNA, 110 bp, synthetic construct
  source 1..110: mol_type = other DNA
ttgcatgaatttatttctgtgctctctatcctgttccattgatgtatatgcctgtttttgtgctggtaccatacccttttgaataatacagctttgtagtatagtcttaa

SEQ ID NO: 80130 - DNA, 110 bp, synthetic construct
  source 1..110: mol_type = other DNA
ttttgtgctggtaccatacccttttgaataatacagctttgtagtatagtcttaagtcagggaacctgattctccagcactgttcttctttatcaagactgttttggtta

SEQ ID NO: 80131 - DNA, 110 bp, synthetic construct
  source 1..110: mol_type = other DNA
acaccccaggaccccatgggctcttcttacaacttcccacttggtaatggcccacatgtaccactccccaccctcactgccttagagcagagtctttttcctagagcagt

SEQ ID NO: 80132 - DNA, 110 bp, synthetic construct
  source 1..110: mol_type = other DNA
ttagaattcacatgatggtccctagaaagctcttaataaccttttgttgaaagaaaaagtgcttctgtcttctccatactggattatttctagattcctactgtgaccta

SEQ ID NO: 80133 - DNA, 110 bp, synthetic construct; identical to SEQ ID NO: 80132
  source 1..110: mol_type = other DNA

SEQ ID NO: 80134 - DNA, 110 bp, synthetic construct
  source 1..110: mol_type = other DNA
gagagtaattggatttctactcttaagagtgattggattcaccctggggtagaagataaatcctcatacagacataaagttttgggctggaggggaaaaagaaatgggca

SEQ ID NO: 80135 - DNA, 110 bp, synthetic construct
  source 1..110: mol_type = other DNA
aggcctactcaactatgtggagctctccagttcttccctctgtcttctctgtactaattcttctgggattatgcctgtcagcgtagtatacacacagtaatagctctgaa

SEQ ID NO: 80136 - DNA, 110 bp, synthetic construct
  source 1..110: mol_type = other DNA
aattcttctgggattatgcctgtcagcgtagtatacacacagtaatagctctgaatgttaaaagacctggctctctttacccctgacccctggcaggtactatcccattt

SEQ ID NO: 80137 - DNA, 110 bp, synthetic construct
  source 1..110: mol_type = other DNA
ataaattctctcctccagtcttgagaacgctccccaccttgttccccaaagtctcttagcttcatctctgaaatttagaggggccattggtctctgcttggctttcccct

SEQ ID NO: 80138 - DNA, 110 bp, synthetic construct
  source 1..110: mol_type = other DNA
ttagcttcatctctgaaatttagaggggccattggtctctgcttggctttcccctccctaaaccatggcccacaaattcaataagtaatctgcggcaatcacagggccta

SEQ ID NO: 80139 - DNA, 110 bp, synthetic construct
  source 1..110: mol_type = other DNA
aatagatacggtctcatcatctcacactgcctcaccagaggaggtgatgctgatttgacaatgaggcaaaacttcccacacttgtcggagaaggcacagtgatcgctttg

SEQ ID NO: 80140 - DNA, 110 bp, synthetic construct
  source 1..110: mol_type = other DNA
tgacaatgaggcaaaacttcccacacttgtcggagaaggcacagtgatcgctttgtgtaggtttttgtgcgtctctgcctcacctctggcgtgctttcgccagtcaggcc

SEQ ID NO: 80141 - DNA, 110 bp, synthetic construct
  source 1..110: mol_type = other DNA
agtaggtcctggttccgtagcagttttgtatatagcaatgtgcattgcccatctcaacctccaaatttatccctctccccagtctttctcctgtggtaaccataaccttg

SEQ ID NO: 80142 - DNA, 110 bp, synthetic construct
  source 1..110: mol_type = other DNA
cgtagcagttttgtatatagcaatgtgcattgcccatctcaacctccaaatttatccctctccccagtctttctcctgtggtaaccataaccttggtttcaaaatctttg

SEQ ID NO: 80143 - DNA, 110 bp, synthetic construct
  source 1..110: mol_type = other DNA
caggaaaatgtccacgagctgctccttgaccactgtaagccccctcactgccccctctggggtggggggcagggggcacaccatccctgcggcaccagccttctgtgttc

SEQ ID NO: 80144 - DNA, 110 bp, synthetic construct
  source 1..110: mol_type = other DNA
tctggggtggggggcagggggcacaccatccctgcggcaccagccttctgtgttcccctctttgccggaccattaaaactactttctctgtttccgccaactctgtctcc

SEQ ID NO: 80145 - DNA, 110 bp, synthetic construct
  source 1..110: mol_type = other DNA
ccaggagacattttcatgttacaagtgtcagtggtggagaatgatagctccagtgggagaaaaacaatgtggcccctgggagtctgaagtaaaggcatgccatccacagc

SEQ ID NO: 80146 - DNA, 110 bp, synthetic construct
  source 1..110: mol_type = other DNA
tgactgactctctatgatggctgaggaactttctgctctccagctgccgtcctgggcttatcttcccctggggattccggaggcaaggcctaaggccacctgcgttcccc

SEQ ID NO: 80147 - DNA, 110 bp, synthetic construct
  source 1..110: mol_type = other DNA
gcttatcttcccctggggattccggaggcaaggcctaaggccacctgcgttcccctccgtttgtgtatttgaggtgccagggtgtgacccagaggagtctatgggtgctt

SEQ ID NO: 80148 - DNA, 110 bp, synthetic construct
  source 1..110: mol_type = other DNA
cctgtcccatgctctgtctcccccaggcttagattctggatgctcagtcctcagtctctctagcttggtttgtatcttgcctatcatgcagctgcctgcccctctgatgt

SEQ ID NO: 80149 - DNA, 110 bp, synthetic construct
  source 1..110: mol_type = other DNA
ctctctagcttggtttgtatcttgcctatcatgcagctgcctgcccctctgatgtctagagacgagctgctcctttctccttaagaggatgtatccagtatctcttagtt

SEQ ID NO: 80150 - DNA, 110 bp, synthetic construct; identical to SEQ ID NO: 80148
  source 1..110: mol_type = other DNA

SEQ ID NO: 80151 - DNA, 110 bp, synthetic construct; identical to SEQ ID NO: 80149
  source 1..110: mol_type = other DNA

SEQ ID NO: 80152 - DNA, 110 bp, synthetic construct
  source 1..110: mol_type = other DNA
tcgacccccatcctcacccaacactgtggctcctcaaacacaccaagatctctactgcctcaaaacccttgcaaatgttgttcgctcgccaatatttggaccagaaagtg

SEQ ID NO: 80153 - DNA, 110 bp, synthetic construct
  source 1..110: mol_type = other DNA
agcttacccattttgttatgcttgtggtttccctgagctggcattttggacagagcacagcagtgatgtttggtttttctgcccccaagatgtctggggtctctgttgaa

SEQ ID NO: 80154 - DNA, 110 bp, synthetic construct
  source 1..110: mol_type = other DNA
cctcctcctcctagctgccaccagggaggcgggcggcctcttccccagctcttgcctgctccctcccagcagcctgcaggccactgaccatttgcaaaccactgagctct

SEQ ID NO: 80155 - DNA, 110 bp, synthetic construct
  source 1..110: mol_type = other DNA
ctgctccctcccagcagcctgcaggccactgaccatttgcaaaccactgagctctgataggaaatcaatcttggtgcatggggagtgtgcgggggtgggcagaaggagac

SEQ ID NO: 80156 - DNA, 110 bp, synthetic construct
  source 1..110: mol_type = other DNA
gaggagctatgcttcctagcccacagctccagctcagcttctagccaacatccagtaccaacttgccagtcatgggagagcgtgatcttgaaagtcaatccttgtagtag

SEQ ID NO: 80157 - DNA, 110 bp, synthetic construct
  source 1..110: mol_type = other DNA
taccaacttgccagtcatgggagagcgtgatcttgaaagtcaatccttgtagtagggagcctcaaagatggcacccaatggtagtattcttgccttcgtgtcatctcttc

SEQ ID NO: 80158 - DNA, 110 bp, synthetic construct
  source 1..110: mol_type = other DNA
ctgaaacatcctaagaactccactcttacagcagagaaaaaggacaacgcctcccacttggaggcatacgaaaacaaatcctgatttttcaagtgaaattaatggtcact

SEQ ID NO: 80159 - DNA, 110 bp, synthetic construct
  source 1..110: mol_type = other DNA
taaaatgtactgtaagaggaggttgtaaaacagtttcccatctttgggattttttccttttcttttctttttttaagctcgaatactatgtactcctaaaccctaaactt

SEQ ID NO: 80160 - DNA, 110 bp, synthetic construct
  source 1..110: mol_type = other DNA
ccttttcttttctttttttaagctcgaatactatgtactcctaaaccctaaacttggggcctgggttaaaaagcctccagccaagaaatcaatagggctcagctggcaaa

SEQ ID NO: 80161 - DNA, 110 bp, synthetic construct
  source 1..110: mol_type = other DNA
agttttcttcctccatgtggcacttgttctcactatgttctccccagttcttgaatgtccctttattatctcagccaattagtgaccctgatttgttaaccagatgtgcc

SEQ ID NO: 80162 - DNA, 110 bp, synthetic construct
  source 1..110: mol_type = other DNA
tgtccctttattatctcagccaattagtgaccctgatttgttaaccagatgtgccctttgaggtcttatgtccacccccaccccctcaaaggacttatcaacttattttc

SEQ ID NO: 80163 - DNA, 110 bp, synthetic construct
  source 1..110: mol_type = other DNA
aaaggagggcatttcagaaacaggaagtagatggtggacacatacccctcctccgggaagaacaggtgttccagggagtcagggttgcttttcacccccagagactctca

SEQ ID NO: 80164 - DNA, 110 bp, synthetic construct
  source 1..110: mol_type = other DNA
gcaccggatataggttcaatccctagcttggcacagggaattaaaggatccggcattgctgcacctgcggtataggtcacaatcgcatctcagatctgatccctggcctg

SEQ ID NO: 80165 - DNA, 110 bp, synthetic construct
  source 1..110: mol_type = other DNA
tcaatccctagcttggcacagggaattaaaggatccggcattgctgcacctgcggtataggtcacaatcgcatctcagatctgatccctggcctggggaactccatatgc

SEQ ID NO: 80166 - DNA, 110 bp, synthetic construct
  source 1..110: mol_type = other DNA
gagtagctcatatttcctttgcctcctcgggcctgaccccacatgcactttgaactcatagctggcctttcataggagttcccagaacagaagcaactgtataacacatg

SEQ ID NO: 80167 - DNA, 110 bp, synthetic construct
  source 1..110: mol_type = other DNA
tcatagctggcctttcataggagttcccagaacagaagcaactgtataacacatgattggaaggagatattttctctgaggatttcatggacagataaaggacaggtctc

SEQ ID NO: 80168 - DNA, 110 bp, synthetic construct
  source 1..110: mol_type = other DNA
aatgccacttttcaggtgatggtgtgctttgtttgcaaatgagcgcgaacagttctttgatcaatttggtgcaaatgccaaacgagaagactacaaagaggaatatagag

SEQ ID NO: 80169 - DNA, 110 bp, synthetic construct
  source 1..110: mol_type = other DNA
tttgatcaatttggtgcaaatgccaaacgagaagactacaaagaggaatatagagggagttccctagtggctcagcaggttaaggacctggcgttgtcacagctgtggct

SEQ ID NO: 80170 - DNA, 110 bp, synthetic construct
  source 1..110: mol_type = other DNA
ttactcgctgaacgggtttttgcaacaggagatgaacggggattttgttggcttatagagtatctgtatataagggatgcccttacttttcactgaggaagttaaatgcc

SEQ ID NO: 80171 - DNA, 110 bp, synthetic construct
  source 1..110: mol_type = other DNA
tagagtatctgtatataagggatgcccttacttttcactgaggaagttaaatgcctttttttttttttttttttttgtctttttgccttttctagggctgctgccttggc

SEQ ID NO: 80172 - DNA, 110 bp, synthetic construct
  source 1..110: mol_type = other DNA
tagtcttttaagaacagtcatacagttctccatagtgactgcaccaactaacattcccacccacagtgtaacctctttttcttcacaccctctctagcatttcttctttg

SEQ ID NO: 80173 - DNA, 110 bp, synthetic construct
  source 1..110: mol_type = other DNA
agtcatacagttctccatagtgactgcaccaactaacattcccacccacagtgtaacctctttttcttcacaccctctctagcatttcttctttgtagactttttgatga

SEQ ID NO: 80174 - DNA, 110 bp, synthetic construct
  source 1..110: mol_type = other DNA
aaaccatttagcaagggctcacacccacgatgaatcacacaatcaaaaggcagcaccatttgagctttaaggacattttgactaaatgcttttaaggcacaattatatac

SEQ ID NO: 80175 - DNA, 110 bp, synthetic construct
  source 1..110: mol_type = other DNA
ccatttgagctttaaggacattttgactaaatgcttttaaggcacaattatatacctaatactggctcttgatttgatctgtccaaaccttcaagttattaccccaaaag

SEQ ID NO: 80176 - DNA, 110 bp, synthetic construct
  source 1..110: mol_type = other DNA
gacagctctataagagcatcagcactgccatttagtaacacaaagggaagggtatcgactgagccaaatagtaataaccactgtcctttatgccaggatctgaaaacata

SEQ ID NO: 80177 - DNA, 110 bp, synthetic construct
  source 1..110: mol_type = other DNA
aagaaaaatcactggttaggacagaggtagaagtgattacatagagctgcctgcctctgctcccccagatggaaaaaccctacaagctgaaaatggctgttatgtcccaa

SEQ ID NO: 80178 - DNA, 110 bp, synthetic construct
  source 1..110: mol_type = other DNA
tctgctcccccagatggaaaaaccctacaagctgaaaatggctgttatgtcccaaagggtacacgctgaagacaccatgaccaccgtgtacagcctttcctgtgcattct

SEQ ID NO: 80179 - DNA, 110 bp, synthetic construct
  source 1..110: mol_type = other DNA
taatctctaggtccagccaggctatcacaaatggcagaatttcatcctttttatagctgagtgatattctgaatatttcacacacacacacacacaccattatcttcttt

SEQ ID NO: 80180 - DNA, 110 bp, synthetic construct
  source 1..110: mol_type = other DNA
cattggccttgctcagttatctatatcagttcttatccaatagggtcttaggggtgaaatgtcccatgggtctcatggtttctttgcccctttcttcctgtaaactgagt

SEQ ID NO: 80181 - DNA, 110 bp, synthetic construct; identical to SEQ ID NO: 80180
  source 1..110: mol_type = other DNA

SEQ ID NO: 80182 - DNA, 110 bp, synthetic construct
  source 1..110: mol_type = other DNA
tgagatagctctataattctccttcatactgagtcagatttttgaaggaaagcgtctgttggcctcataaaaaagttgggggatttccctctggaatttgttacataaat

SEQ ID NO: 80183 - DNA, 110 bp, synthetic construct
  source 1..110: mol_type = other DNA
agcatgatgacaaggggctgcaatgcattgacagcaatcaactctaccttcaagaaactgcaaaggggttttgaacacaaatttcaagaaaggaggtgcatcccgttctt

SEQ ID NO: 80184 - DNA, 110 bp, synthetic construct
  source 1..110: mol_type = other DNA
aactgcaaaggggttttgaacacaaatttcaagaaaggaggtgcatcccgttcttcccaattggtcaactgcttttcttttcctaagctccttttctgcctcccgttgta

SEQ ID NO: 80185 - DNA, 110 bp, synthetic construct
  source 1..110: mol_type = other DNA
atgtggaaagactttcagtggaaaatcacgtctctctgtccaccatagaactcatacaggtgagaaaccttatgaatgcagacgatgtggaaaagcatttggcgagaagt

SEQ ID NO: 80186 - DNA, 110 bp, synthetic construct
  source 1..110: mol_type = other DNA
acaggtgagaaaccttatgaatgcagacgatgtggaaaagcatttggcgagaagtcaacccttactgtacatcagagaacgcatacaggagaaaaaccctataagtgcaa

SEQ ID NO: 80187 - DNA, 110 bp, synthetic construct
  source 1..110: mol_type = other DNA
ctgtaaacgcgggtaaccgcgaatgatgtgcctgcatgtctggccaacataaatctcagctgtgtccgcatgaaaaatcctctgccacccgcccccttgaatgggttggg

SEQ ID NO: 80188 - DNA, 110 bp, synthetic construct
  source 1..110: mol_type = other DNA
tcagctgtgtccgcatgaaaaatcctctgccacccgcccccttgaatgggttgggaggtggtccccgggggccccgggcagcttgcctccagctgggcttgttttttgtt

SEQ ID NO: 80189 - DNA, 110 bp, synthetic construct
  source 1..110: mol_type = other DNA
ctatcaactgtcaaagtaggaatgtggggttctgaattcaaatgtggggagaacagtaagtaaagaacttttttatcagtctacctcctgtgaattgctgatatttcaaa

SEQ ID NO: 80190 - DNA, 110 bp, synthetic construct
  source 1..110: mol_type = other DNA
gtaagtaaagaacttttttatcagtctacctcctgtgaattgctgatatttcaaattactattagtagctttaggggtattttgggcacttttgagttttacagtttttc

SEQ ID NO: 80191 - DNA, 110 bp, synthetic construct
  source 1..110: mol_type = other DNA
ttcctcccagctatttctttccctaattctctctagcatgctagcctaggctcgaacttccccacacactgatgaagtcagttccattggggaacaatttggagccttat

SEQ ID NO: 80192 - DNA, 110 bp, synthetic construct
  source 1..110: mol_type = other DNA
tctgcccatcacttccctagctggttctggctagacaaaatgccaacgttcagtgggctttcccttccaaagtgccattaccttctaaacactcagcagaccactgttct

SEQ ID NO: 80193 - DNA, 110 bp, synthetic construct
  source 1..110: mol_type = other DNA
ggctttcccttccaaagtgccattaccttctaaacactcagcagaccactgttcttctatggaggacttatgagtgtcgtgggccaggaaaatagagttgtcacatgaca

SEQ ID NO: 80194 - DNA, 110 bp, synthetic construct
  source 1..110: mol_type = other DNA
agttgcaaaacacgtatcaccaataaaagagtggaatctgaatatatgaaaacgattcctacaaatcaataaggaaaaggcagacaatgcaatataaaaatgagcaaaag

SEQ ID NO: 80195 - DNA, 110 bp, synthetic construct
  source 1..110: mol_type = other DNA
tccagcattacacatctggatctgaacttacaataataattgtaggtagcctttaccaagtagttgctatgtgcctgtcattatgtgtgcaacagctttgatgttcccac

SEQ ID NO: 80196 - DNA, 110 bp, synthetic construct
  source 1..110: mol_type = other DNA
ccaagtagttgctatgtgcctgtcattatgtgtgcaacagctttgatgttcccactgacagtgaatgaatgacacccagcctttgcccaagccagggaacttggaagtca

SEQ ID NO: 80197 - DNA, 110 bp, synthetic construct
  source 1..110: mol_type = other DNA
ctcctgcccagcaacctaaccccagcaggactgcaaagaagacaaaagcagggggagaatcctagcgtctctacactaagctcccaagaccccaaagagcatggccagta

SEQ ID NO: 80198 - DNA, 110 bp, synthetic construct
  source 1..110: mol_type = other DNA
acacacactaaaagttgcagaaccgtcatagtggcgcatggaaatggtcagtaggcaaaatgactgaaaaatatggatttttcttctctttgttgctttaactaattcac

SEQ ID NO: 80199 - DNA, 110 bp, synthetic construct
  source 1..110: mol_type = other DNA
cgtatcatgtatatttgactacagaatctgtcgaagctctcacagagagagtgaatttgcttctttattcttgtgcatccttagaagccattgtcactttcctttggctt

SEQ ID NO: 80200 - DNA, 110 bp, synthetic construct
  source 1..110: mol_type = other DNA
tgaatgaatgggtgactaaaagggaacttggacgtctgtcctcatcactcattcactcacacacatgcaatcacattaacgtggtcctggcttataaatagaaagttctt

SEQ ID NO: 80201 - DNA, 110 bp, synthetic construct
  source 1..110: mol_type = other DNA
ctcacacacatgcaatcacattaacgtggtcctggcttataaatagaaagttcttaataactatcttcctcaaatctgtgggcaataagaaaagtgatacagggaaattt

SEQ ID NO: 80202 - DNA, 110 bp, synthetic construct
  source 1..110: mol_type = other DNA
attcgtttctgctgcaccacaacgggaactctgactgtgaattttgcaccaggttcacatcctatctccaaacaaaactacctctttggtgccattttcatgcttccatg

SEQ ID NO: 80203 - DNA, 110 bp, synthetic construct; identical to SEQ ID NO: 80202
  source 1..110: mol_type = other DNA

SEQ ID NO: 80204 - DNA, 110 bp, synthetic construct
  source 1..110: mol_type = other DNA
ctggtgttgctgcagcttcgccataggtcacagctgcagcataggtcagagctgcagcttggagatccaatctctagcccacgaacttctgtaaactgtgaatgcggcca

SEQ ID NO: 80205 - DNA, 110 bp, synthetic construct
  source 1..110: mol_type = other DNA
agcttggagatccaatctctagcccacgaacttctgtaaactgtgaatgcggccatttaaaaaatcacattacacaacttagtatataaaatgtttctcagttaaacctc

SEQ ID NO: 80206 - DNA, 110 bp, synthetic construct
  source 1..110: mol_type = other DNA
agagaatgttctaattttattctttacatgtagctttcagtcttctcagcaccatttttttggctgtgccagcagcatgtggaaattcgcgggccaaggatcaaacccac

SEQ ID NO: 80207 - DNA, 110 bp, synthetic construct; identical to SEQ ID NO: 80206
  source 1..110: mol_type = other DNA

SEQ ID NO: 80208 - DNA, 110 bp, synthetic construct
  source 1..110: mol_type = other DNA
ctgacaagatccttggaacctcttcaggatgggatatatagggtgaattagacatggtccatccataccactgaggattgctgtaaaattaaacaactataaaatttctt

SEQ ID NO: 80209 - DNA, 110 bp, synthetic construct
  source 1..110: mol_type = other DNA
ggtccatccataccactgaggattgctgtaaaattaaacaactataaaatttcttagcatagtgcctgggacagtctaagcactccataaatgttaactataatcttcac

SEQ ID NO: 80210 - DNA, 110 bp, synthetic construct
  source 1..110: mol_type = other DNA
gcgtagtgttcccactctgtttgttgtttggcctgggacttctcagccttgttgggtggttcctgatattttcaaacttacagaatcctaggacctcttcccccaatgtc

SEQ ID NO: 80211 - DNA, 110 bp, synthetic construct
  source 1..110: mol_type = other DNA
gccttgttgggtggttcctgatattttcaaacttacagaatcctaggacctcttcccccaatgtcctgaccccacaatgagccatagctgcccctttctttatcaggatt

SEQ ID NO: 80212 - DNA, 110 bp, synthetic construct
  source 1..110: mol_type = other DNA
tttggccctagaaaaaggaagtgacagaattgcttttgaataactaaagtgacccggctcagaggggagaaaaaggtttaggaccggcttgtttcctgtcttaaaaggga

SEQ ID NO: 80213 - DNA, 110 bp, synthetic construct
  source 1..110: mol_type = other DNA
taaccactaaccaccaacacactaacttccatacattacatccagtgttccttcccagagatacctctgtttactcattccaatttccatccaagcctggtttttacttc

SEQ ID NO: 80214 - DNA, 110 bp, synthetic construct
  source 1..110: mol_type = other DNA
cagagatacctctgtttactcattccaatttccatccaagcctggtttttacttcctctcagaagcagaatgctttgtggtcataaaagtgcactatcatgtgctaaaaa

SEQ ID NO: 80215 - DNA, 110 bp, synthetic construct
  source 1..110: mol_type = other DNA
tcacatttcctcatgctgtacagtaagccccactgcccatccattccaaacataacagtttgcatcctcaaaccgcaaaatacccatccattccactcctttccccatcc

SEQ ID NO: 80216 - DNA, 110 bp, synthetic construct
  source 1..110: mol_type = other DNA
ccaaacataacagtttgcatcctcaaaccgcaaaatacccatccattccactcctttccccatccaccatgggaaccacaagtctgttctccttgtccatggtgtctttc

SEQ ID NO: 80217 - DNA, 110 bp, synthetic construct
  source 1..110: mol_type = other DNA
tatatgtcttctcatagtgtgtacctttctgcttattattccattgaccattggtattgacaggtgttctggagttctcaggggtgtcagtggttcatgtgtacctcttt

SEQ ID NO: 80218 - DNA, 110 bp, synthetic construct
  source 1..110: mol_type = other DNA
attgacaggtgttctggagttctcaggggtgtcagtggttcatgtgtacctctttgctggataggctctagggattgctctatgtaaacataggcacaggttctgctgtt

SEQ ID NO: 80219 - DNA, 110 bp, synthetic construct
  source 1..110: mol_type = other DNA
atataggatattgcagatgattgagttgatttccctgtgctttacagtagatccttgttagtcaccatatttacatatagaattgtgtatgtgttaagcccaatctccta

SEQ ID NO: 80220 - DNA, 110 bp, synthetic construct
  source 1..110: mol_type = other DNA
tgttagtcaccatatttacatatagaattgtgtatgtgttaagcccaatctcctattttatcactccccccacaccatggtttcccttttggtaacaataaatttgattt

SEQ ID NO: 80221 - DNA, 110 bp, synthetic construct
  source 1..110: mol_type = other DNA
gccaaacaggataccctcccctttaggcagtgcctaaagcaaggtattagtttataacttaaacagtacttcctatgatctaggcacaattctagcagctttacctgaag

SEQ ID NO: 80222 - DNA, 110 bp, synthetic construct
  source 1..110: mol_type = other DNA
aacttaaacagtacttcctatgatctaggcacaattctagcagctttacctgaaggaagttactgaatcctcacaacaattcactgaagtaagtattatcatccccaatt

SEQ ID NO: 80223 - DNA, 110 bp, synthetic construct; identical to SEQ ID NO: 80221
  source 1..110: mol_type = other DNA

SEQ ID NO: 80224 - DNA, 110 bp, synthetic construct; identical to SEQ ID NO: 80222
  source 1..110: mol_type = other DNA

SEQ ID NO: 80225 - DNA, 110 bp, synthetic construct
  source 1..110: mol_type = other DNA
gaagaatcatgagcaaataaatgttggctcttttaagctactaaattttggggtggtttgtttcacaacagataaatgaatgaaaaaaattaaataaggtagtagtaccc

SEQ ID NO: 80226 - DNA, 110 bp, synthetic construct
  source 1..110: mol_type = other DNA
gtttgtttcacaacagataaatgaatgaaaaaaattaaataaggtagtagtaccccacccagtgactggcaggtataggtactcaacagatgattgtttcttttccattc

SEQ ID NO: 80227 - DNA, 110 bp, synthetic construct
  source 1..110: mol_type = other DNA
aactcttctctaagttttggatagaatacatttgtgaagccatctggtcctggactttgttttgttgaaagtttttaatctcggtttcaatttcaatatctgtgattggt

SEQ ID NO: 80228 - DNA, 110 bp, synthetic construct
  source 1..110: mol_type = other DNA
ggtcctggactttgttttgttgaaagtttttaatctcggtttcaatttcaatatctgtgattggtccctctgtcttttctcttttgtcttggtttagtcttggaagactg

SEQ ID NO: 80229 - DNA, 110 bp, synthetic construct
  source 1..110: mol_type = other DNA
atggttcagatgagatgagaggatcagcttcctgtcagaggagctagctcatggcaagggaagtgagagaatttttatatttgcattcacccaaaaataaaaataattat

SEQ ID NO: 80230 - DNA, 110 bp, synthetic construct
  source 1..110: mol_type = other DNA
aagggaagtgagagaatttttatatttgcattcacccaaaaataaaaataattatccaatctgctttgtaataaaaattggtatggtccagccttgatgcagtggatgtt

SEQ ID NO: 80231 - DNA, 110 bp, synthetic construct
  source 1..110: mol_type = other DNA
tgccaaacattgttccatgtgttctatatgcattagtgcatataatctttgtagtagatactattggtgtccttcctttacttataaaggcagtgaggcagatttagaat

SEQ ID NO: 80232 - DNA, 110 bp, synthetic construct
  source 1..110: mol_type = other DNA
agatactattggtgtccttcctttacttataaaggcagtgaggcagatttagaattgttacctgctcaaatgtcatgtaacctatgaaaatagcagatctgaaagctaac

SEQ ID NO: 80233 - DNA, 110 bp, synthetic construct
  source 1..110: mol_type = other DNA
agaaaacttccaagacccctgcagctgaaaataagttctatctcttgtgaagcctcacagctcttccttctataattatttagtcttagcccctgtatttctaaaatagt

SEQ ID NO: 80234 - DNA, 110 bp, synthetic construct
  source 1..110: mol_type = other DNA
ttctatctcttgtgaagcctcacagctcttccttctataattatttagtcttagcccctgtatttctaaaatagtatcttgtacagctaggtataaatatttattgaaaa

SEQ ID NO: 80235 - DNA, 110 bp, synthetic construct
  source 1..110: mol_type = other DNA
ctttttcacttcacaattatgcccattaatagcgtggtatgtctaaacaacaatttcatcaactgcatcgtgatcatcaaaagttacgaaaacaaatcctctgtttttcc

SEQ ID NO: 80236 - DNA, 110 bp, synthetic construct
  source 1..110: mol_type = other DNA
tcatcaactgcatcgtgatcatcaaaagttacgaaaacaaatcctctgtttttcccactctgcctgccttccataacttctatgttttcaagcttaccatacttttcaaa

SEQ ID NO: 80237 - DNA, 110 bp, synthetic construct
  source 1..110: mol_type = other DNA
gaatttctttccttgcctttccatctacccacattcctcggcttatggcccaatatatccatcttcaaagttagcaatgtcatatcaagtcatcaaatttttcagacact

SEQ ID NO: 80238 - DNA, 110 bp, synthetic construct
  source 1..110: mol_type = other DNA
tatccatcttcaaagttagcaatgtcatatcaagtcatcaaatttttcagacactgtcatatttctaaatctttcccgcttgatcttctattacaattacaaggccctgg

SEQ ID NO: 80239 - DNA, 110 bp, synthetic construct
  source 1..110: mol_type = other DNA
ttttttgtgtgtgtctctacggcctaggctatttctcctatttaatgaggaggagcctaacttagtggctctgactctggagccagaccacctggatttgcaacttggcc

SEQ ID NO: 80240 - DNA, 110 bp, synthetic construct
  source 1..110: mol_type = other DNA
cctaacttagtggctctgactctggagccagaccacctggatttgcaacttggcccacctattcttcactgctgaccttgggcaagttactccatagctctgggcctcag

SEQ ID NO: 80241 - DNA, 110 bp, synthetic construct
  source 1..110: mol_type = other DNA
gaggagactcaggcagctgtggtttccgacttcagacctcagaagagctgtcagggtgcaaaaggagaggcacgccctgcttcgccccagagggactttgtggttagaac

SEQ ID NO: 80242 - DNA, 110 bp, synthetic construct
  source 1..110: mol_type = other DNA
gtgcaaaaggagaggcacgccctgcttcgccccagagggactttgtggttagaacatcttgtgttcaaacccaggtctgttctgtattacttgtgtgaccttgagccagg

SEQ ID NO: 80243 - DNA, 110 bp, synthetic construct
  source 1..110: mol_type = other DNA
aggcaaggccactgaaagtgtgatctatgaaaagtagcttaggcaatggaatgttcaagcagatttatgaaaatcactcagagagtagaaaagatagtcttgcgaccaga

SEQ ID NO: 80244 - DNA, 110 bp, synthetic construct
  source 1..110: mol_type = other DNA
caagcagatttatgaaaatcactcagagagtagaaaagatagtcttgcgaccagagaagaggtcttgaggagaaaggggaaggatggcaaagtgagggctgttccctctt

SEQ ID NO: 80245 - DNA, 110 bp, synthetic construct
  source 1..110: mol_type = other DNA
gtgtttctactgccctacccttgtcatatctgaaggaaacaacccaatgactccccttttgcaggttcacagcgagggcataaccaattccaaacaaatggttttaggga

SEQ ID NO: 80246 - DNA, 110 bp, synthetic construct
  source 1..110: mol_type = other DNA
cttttgcaggttcacagcgagggcataaccaattccaaacaaatggttttagggatggtgtcgaatatataaatatataaatatgtgtttgattccagctaaatctacgg

SEQ ID NO: 80247 - DNA, 110 bp, synthetic construct
  source 1..110: mol_type = other DNA
tcttgcccacttgtgacatgcccagctgccagtttttctcccttcgtttgtggtagtggttatattatcagtataactaggggccttttctagatttttccatctacatt

SEQ ID NO: 80248 - DNA, 110 bp, synthetic construct
  source 1..110: mol_type = other DNA
gtggttatattatcagtataactaggggccttttctagatttttccatctacattggtttgctgcttttaaaaactgttcagggaataaactattcttagtattcatctg

SEQ ID NO: 80249 - DNA, 110 bp, synthetic construct
  source 1..110: mol_type = other DNA
gggcttcagtgactctactcttgcaataaccttgcccgcatatctcctgggtggctcctgcctcaccaaagtaagcccagtacacagcacccacgttgcccatctcatcc

SEQ ID NO: 80250 - DNA, 110 bp, synthetic construct
  source 1..110: mol_type = other DNA
tcctgcctcaccaaagtaagcccagtacacagcacccacgttgcccatctcatccccaattcccaacccagtgtctttggaacatactgatgagcaccttgtacataaag

SEQ ID NO: 80251 - DNA, 110 bp, synthetic construct
  source 1..110: mol_type = other DNA
tgctgcttttcagctgaatacactggggcttcttcttatacctgttcattacatattggtatttcctggcgttcaagggtctattttctttttcttactctgcctttccc

SEQ ID NO: 80252 - DNA, 110 bp, synthetic construct
  source 1..110: mol_type = other DNA
ttggtatttcctggcgttcaagggtctattttctttttcttactctgcctttcccctaagtcatcccacaattttcctggtttgtgctaccattttatatactggcaaca

SEQ ID NO: 80253 - DNA, 110 bp, synthetic construct
  source 1..110: mol_type = other DNA
attggaatttcattaatcaagatctggagggtgttcagagaacatagtctgtagtcagactgggattaatgcttcttgttttgtccattaggatgaactgtagatcattt

SEQ ID NO: 80254 - DNA, 110 bp, synthetic construct
  source 1..110: mol_type = other DNA
cagactgggattaatgcttcttgttttgtccattaggatgaactgtagatcatttgatgtgatgatggccacaccacagcattttcaacttcagacaggatacattggtc

SEQ ID NO: 80255 - DNA, 110 bp, synthetic construct
  source 1..110: mol_type = other DNA
aaaagagaggcccaacgcccttcacagctgtttttatatccccacgatgtgggcctgtgtggagacccaatttctcctaccccagccccctacactatgtgtaagagctg

SEQ ID NO: 80256 - DNA, 110 bp, synthetic construct
  source 1..110: mol_type = other DNA
cgcccttcacagctgtttttatatccccacgatgtgggcctgtgtggagacccaatttctcctaccccagccccctacactatgtgtaagagctgagtgttgtttgatct

SEQ ID NO: 80257 - DNA, 110 bp, synthetic construct
  source 1..110: mol_type = other DNA
atatacctagtctctccacctcaattacaagtgcctgttggcaagaacactttcaaggtggcagcgtgcacagtctattaacaccctcttcatagctcttaaaagatgcc

SEQ ID NO: 80258 - DNA, 110 bp, synthetic construct
  source 1..110: mol_type = other DNA
aggtggcagcgtgcacagtctattaacaccctcttcatagctcttaaaagatgcccatatcaaatcaaggttatgagtcattggtaatagcaacaatagtaatagtaata

SEQ ID NO: 80259 - DNA, 110 bp, synthetic construct
  source 1..110: mol_type = other DNA
ctttctcaatgtagccatttattgctataaacatccctcttagaactgcttctgctgcatcatataagttttgacatgttgtgctcccatttttatttttgtcaatatat

SEQ ID NO: 80260 - DNA, 110 bp, synthetic construct
  source 1..110: mol_type = other DNA
tgcatcatataagttttgacatgttgtgctcccatttttatttttgtcaatatattttttaatttctcactttatttcttcttgactcgtaggtgtttaggaggctgttg

SEQ ID NO: 80261 - DNA, 110 bp, synthetic construct
  source 1..110: mol_type = other DNA
cacattatcctcatctagatcaatcacaagttattagagggttcccaatacttacagcaggatctcattgttaagcaaatacgaatgcaatagtttgtatctattaaccc

SEQ ID NO: 80262 - DNA, 110 bp, synthetic construct; identical to SEQ ID NO: 80261
  source 1..110: mol_type = other DNA

SEQ ID NO: 80263 - DNA, 110 bp, synthetic construct
  source 1..110: mol_type = other DNA
ggtggttccaaagttcatttagcagcaaaatttgatctgaactgttaattcctctcacgtgtaaatgttcaactgttttgctgcagaaatactaatgtgtttgactatgg

SEQ ID NO: 80264 - DNA, 110 bp, synthetic construct
  source 1..110: mol_type = other DNA
cacgtgtaaatgttcaactgttttgctgcagaaatactaatgtgtttgactatgggggtgttgcctcaagacctactggggttaatacataatatatgataacctctata

SEQ ID NO: 80265 - DNA, 110 bp, synthetic construct
  source 1..110: mol_type = other DNA
ttgattatatatttaatatacagcagtttgtatctgctaaacccaaactcccaatttatccctctaccaccccctttcttctttggtaaactttaagtttttttctgtgt

SEQ ID NO: 80266 - DNA, 110 bp, synthetic construct
  source 1..110: mol_type = other DNA
atatacagcagtttgtatctgctaaacccaaactcccaatttatccctctaccaccccctttcttctttggtaaactttaagtttttttctgtgtctgtgagtctgtttc

SEQ ID NO: 80267 - DNA, 110 bp, synthetic construct
  source 1..110: mol_type = other DNA
gtgaaataaaatgccttaatgtggtacatctctaagtttaatccactaaggattttgagagctggcagatctgactagccttggtgtctatctgttattttcataatatc

SEQ ID NO: 80268 - DNA, 110 bp, synthetic construct; identical to SEQ ID NO: 80267
  source 1..110: mol_type = other DNA

SEQ ID NO: 80269 - DNA, 110 bp, synthetic construct
  source 1..110: mol_type = other DNA
ctgccagccccctggaaaaggaccgctggccagaaaagctagaacaagttcggccccaccatgcaacatctgcctccataccaaagtggtcctcccaattcagctgccct

SEQ ID NO: 80270 - DNA, 110 bp, synthetic construct; identical to SEQ ID NO: 80269
  source 1..110: mol_type = other DNA

SEQ ID NO: 80271 - DNA, 110 bp, synthetic construct
  source 1..110: mol_type = other DNA
aggtaaaaaggccttattcctggtaggtttatagaaaatccatatagtattaacgtattatgtaaggtataaaggatgataactgtacttactgaacactgtaacactgg

SEQ ID NO: 80272 - DNA, 110 bp, synthetic construct
  source 1..110: mol_type = other DNA
tctggtctggtcattatctggccctgcctagtgttgaggctgctggctatagtgggtaaggctgggttctggcataactgtcgtcacagctctaggagttcagtgctggt

SEQ ID NO: 80273 - DNA, 110 bp, synthetic construct
  source 1..110: mol_type = other DNA
gtaaggctgggttctggcataactgtcgtcacagctctaggagttcagtgctggtgggcagggccaggtcagtgagtggctagctttggcagccagagatcctggatctg

SEQ ID NO: 80274 - DNA, 110 bp, synthetic construct
  source 1..110: mol_type = other DNA
atacaatgtgcttgggagtattccttcctctggaatttttttttttttttttggaagagtttcaaaagaataggtgttaacatttctctgaatgattgaactcacctgta

SEQ ID NO: 80275 - DNA, 110 bp, synthetic construct
  source 1..110: mol_type = other DNA
tttttttggaagagtttcaaaagaataggtgttaacatttctctgaatgattgaactcacctgtaaagacatcaggttctggacttttatcttttggaaacttttaaatc

SEQ ID NO: 80276 - DNA, 110 bp, synthetic construct
  source 1..110: mol_type = other DNA
atatatatatataaacattccctgttaatccaatcacctattgatgaacacttggttttctttaaattcttgattatggtaagcagtgcaccctgagtttttctttgcta

SEQ ID NO: 80277 - DNA, 110 bp, synthetic construct
  source 1..110: mol_type = other DNA
ttttctttaaattcttgattatggtaagcagtgcaccctgagtttttctttgctattgctctctcacaccatcttacatcaaagccaaacttatttgaacctaaaagaac

SEQ ID NO: 80278 - DNA, 110 bp, synthetic construct
  source 1..110: mol_type = other DNA
cacaaaaccagataggaaaaaataaaggtgacagaagaaaaagagagaagagaaaataagcaagatgggacctataccactaggagggaggtggaaagcagaaaatctcc

SEQ ID NO: 80279 - DNA, 110 bp, synthetic construct
  source 1..110: mol_type = other DNA
ataagcaagatgggacctataccactaggagggaggtggaaagcagaaaatctcccgtaccatgggatgtaccccaacagtgaggagatcagcgagcaattggtgtgagg

SEQ ID NO: 80280 - DNA, 110 bp, synthetic construct
  source 1..110: mol_type = other DNA
tagagcatttaattcactcatatgtattttgtaggttttgtccttccattcctctttgttctcgtctcatgtgaattcatgcctcgttttagtgttgtgtttggattgct

SEQ ID NO: 80281 - DNA, 110 bp, synthetic construct
  source 1..110: mol_type = other DNA
ttgttctcgtctcatgtgaattcatgcctcgttttagtgttgtgtttggattgctttctattttattttcttatttttttctactgtacagcatggtgactcagttacac

SEQ ID NO: 80282 - DNA, 110 bp, synthetic construct
  source 1..110: mol_type = other DNA
atacatttactcctcttggaatgataaatatctattggccttttgttctaagaccacgaattaaaatgccagcccaatttgtatgtgagatagattctggtttctatagt

SEQ ID NO: 80283 - DNA, 110 bp, synthetic construct
  source 1..110: mol_type = other DNA
acgaattaaaatgccagcccaatttgtatgtgagatagattctggtttctatagtagattgcagagttagagaatattactgggaatttgattggaatatttttcaaaat

SEQ ID NO: 80284 - DNA, 110 bp, synthetic construct; identical to SEQ ID NO: 80282
  source 1..110: mol_type = other DNA

SEQ ID NO: 80285 - DNA, 110 bp, synthetic construct; identical to SEQ ID NO: 80283
  source 1..110: mol_type = other DNA

SEQ ID NO: 80286 - DNA, 110 bp, synthetic construct
  source 1..110: mol_type = other DNA
ttggctcaaggactccccatcggctttgctgaacattcttagactgcatggcagtgtaaggacatttcctctcgccattgcttggggtcatgctctttcagccttttcca

SEQ ID NO: 80287 - DNA, 110 bp, synthetic construct
  source 1..110: mol_type = other DNA
gtaaggacatttcctctcgccattgcttggggtcatgctctttcagccttttccagatccctcaccattttctctcaataagtgtttcctctaatcaaaaaaacatcctt

SEQ ID NO: 80288 - DNA, 110 bp, synthetic construct
  source 1..110: mol_type = other DNA
aagatcacattgcatgttgcatagaatttattgacaaaagtccttctaagcttctctagttgtactgtcaaagtgtgtgcatatgtgtgtgtgtgctgggaagggaaggg

SEQ ID NO: 80289 - DNA, 110 bp, synthetic construct
  source 1..110: mol_type = other DNA
ctagttgtactgtcaaagtgtgtgcatatgtgtgtgtgtgctgggaagggaagggatcagtgattcttccatcccctcctatcttttcactttcagtctatcctttcact

SEQ ID NO: 80290 - DNA, 110 bp, synthetic construct
  source 1..110: mol_type = other DNA
cttcagaaggaaagtttgagcaattgaaaatgatatttcttctttgacttgcattttttattttacaaagctttcttctactctcaacccatttgtttctcaggcctttc

SEQ ID NO: 80291 - DNA, 110 bp, synthetic construct; identical to SEQ ID NO: 80290
  source 1..110: mol_type = other DNA

SEQ ID NO: 80292 - DNA, 110 bp, synthetic construct
  source 1..110: mol_type = other DNA
atgctattctggtcagaaaagatgcttgaaatttttatactcatttattggggcttgctttgtgcactagtattttgtcaatccaagggaatgttccatgtgcacttgaa

SEQ ID NO: 80293 - DNA, 110 bp, synthetic construct
  source 1..110: mol_type = other DNA
tatactcatttattggggcttgctttgtgcactagtattttgtcaatccaagggaatgttccatgtgcacttgaacagaatatgtagtttcctttttttggatgtaatgc

SEQ ID NO: 80294 - DNA, 110 bp, synthetic construct
  source 1..110: mol_type = other DNA
acatatctctaattccatgcaggtgggaactatttcttgctttctcaacaccatatactgaacaccaagcactgtgcctgatatagcagatgttcactaaaaattggatg

SEQ ID NO: 80295 - DNA, 110 bp, synthetic construct
  source 1..110: mol_type = other DNA
tactgaacaccaagcactgtgcctgatatagcagatgttcactaaaaattggatgaatgcatgaatatttgaatatgtgacataaagaatcatcaattctttcctttcct

SEQ ID NO: 80296 - DNA, 110 bp, synthetic construct
  source 1..110: mol_type = other DNA
gacatatgtaccttaaagtttatagtagcattatttatgactgtcaagatatagaaccaacctaagtgtccattaagagatgaacagataaagaaaatatggtgtgtgtg

SEQ ID NO: 80297 - DNA, 110 bp, synthetic construct; identical to SEQ ID NO: 80296
  source 1..110: mol_type = other DNA

SEQ ID NO: 80298 - DNA, 110 bp, synthetic construct
  source 1..110: mol_type = other DNA
gaaaaggctatgaatatgagcaaaacctcagaagtgctccagggatctgaaaagagcccaagccaattttatgagaggcttttccaagcattcctctttacactccctta

SEQ ID NO: 80299 - DNA, 110 bp, synthetic construct
  source 1..110: mol_type = other DNA
gcccaagccaattttatgagaggcttttccaagcattcctctttacactcccttagacccagaagccactgagaatccatgggtggttaacagactttgttctctaggcc

SEQ ID NO: 80300 - DNA, 110 bp, synthetic construct
  source 1..110: mol_type = other DNA
agtagcctatggtctgtatgtgaggtaggtgttataacttaaaaacaaacaagctgttataactcagtccccatgatcagcagatgtctgtgtgttttgacacagcacat

SEQ ID NO: 80301 - DNA, 110 bp, synthetic construct
  source 1..110: mol_type = other DNA
gttataactcagtccccatgatcagcagatgtctgtgtgttttgacacagcacatattttgtatctggaaagcctaaaatttctgcttttctcctgaagaagtgcgcttt

SEQ ID NO: 80302 - DNA, 110 bp, synthetic construct; identical to SEQ ID NO: 80300
  source 1..110: mol_type = other DNA

SEQ ID NO: 80303 - DNA, 110 bp, synthetic construct; identical to SEQ ID NO: 80301
  source 1..110: mol_type = other DNA

SEQ ID NO: 80304 - DNA, 110 bp, synthetic construct
  source 1..110: mol_type = other DNA
actgtcttccaaagtacctgtatgattttgcattctcaccagcagtgcatggggattcttactgctccacatccttgccagagtttggtgttctatgtgctggactgtag

SEQ ID NO: 80305 - DNA, 110 bp, synthetic construct
  source 1..110: mol_type = other DNA
ttcttactgctccacatccttgccagagtttggtgttctatgtgctggactgtagtcattctaatagatgtgtaatggtacatcatcattgtttaatttgcatttatttg

SEQ ID NO: 80306 - DNA, 110 bp, synthetic construct
  source 1..110: mol_type = other DNA
cagacactgttcctagacttctatgagctttaaagatttcctctcttttgaataaataatttcctagactttgataatttcttcacataattgcatttatcactactcag

SEQ ID NO: 80307 - DNA, 110 bp, synthetic construct; identical to SEQ ID NO: 80306
  source 1..110: mol_type = other DNA

SEQ ID NO: 80308 - DNA, 110 bp, synthetic construct
  source 1..110: mol_type = other DNA
tttacaatgttttatgaatttctgctgtacagcaaagtgatgactcagatatatatcttttctcatattacactcaattgccgagaccagctcagcaggttagggctgaa

SEQ ID NO: 80309 - DNA, 110 bp, synthetic construct
  source 1..110: mol_type = other DNA
tgtacagcaaagtgatgactcagatatatatcttttctcatattacactcaattgccgagaccagctcagcaggttagggctgaaggacaggtgctgtgaaacttaagga

SEQ ID NO: 80310 - DNA, 110 bp, synthetic construct
  source 1..110: mol_type = other DNA
atgtctgtatagagaggtgactaacataatgggtcataaaatacagtgaagaccaaggtcaaactgggttgccaggagatcaattggtatgctgaacccttctcccattc

SEQ ID NO: 80311 - DNA, 110 bp, synthetic construct
  source 1..110: mol_type = other DNA
aggtcaaactgggttgccaggagatcaattggtatgctgaacccttctcccattcacagtcttcgttctagagctacaccaatcacttttgtttccatgaatccctgatc

SEQ ID NO: 80312 - DNA, 110 bp, synthetic construct
  source 1..110: mol_type = other DNA
aagaaaagactggctagtcagagcatgcagagaaagtgataactacagaggtaggtttgagagggtgatcagctaccagggtggagaaagaagggccactcacaaccata

SEQ ID NO: 80313 - DNA, 110 bp, synthetic construct
  source 1..110: mol_type = other DNA
tttgagagggtgatcagctaccagggtggagaaagaagggccactcacaaccataccagaggagattcagggggcaatatcctatgcagagctatgcattaataaagcat

SEQ ID NO: 80314 - DNA, 110 bp, synthetic construct
  source 1..110: mol_type = other DNA
tttaattgtccctgtctcttttattataagctggcagtgtttctgctaaattaatttcctaggaactttgtgagcattccatgtatttcataaggattcattccattata

SEQ ID NO: 80315 - DNA, 110 bp, synthetic construct
  source 1..110: mol_type = other DNA
ttcctaggaactttgtgagcattccatgtatttcataaggattcattccattataccaaagaaaaactggcagcttttttcaggataatcccttccctaattctgactcc

SEQ ID NO: 80316 - DNA, 110 bp, synthetic construct
  source 1..110: mol_type = other DNA
tcctaaatgcagtgttaatgtgaattttgaaatgagcctgagattttgttttgtttttgtttcattttgttttgtgaggcatctattctttttgtaggaatacctgtaag

SEQ ID NO: 80317 - DNA, 110 bp, synthetic construct
  source 1..110: mol_type = other DNA
tttgaaatgagcctgagattttgttttgtttttgtttcattttgttttgtgaggcatctattctttttgtaggaatacctgtaagtttctttccttgtctttgatggtaa

SEQ ID NO: 80318 - DNA, 110 bp, synthetic construct
  source 1..110: mol_type = other DNA
agtatctggaggaggattgagaaagatacctaagttttgcttcctatcagcactgtcaatgaggttctagaaaggaatcataacaagtcctagagaggaatggctgtggg

SEQ ID NO: 80319 - DNA, 110 bp, synthetic construct
  source 1..110: mol_type = other DNA
tcaatgaggttctagaaaggaatcataacaagtcctagagaggaatggctgtggggtatgtgagacccttggcacaaaaaatcaagccttagtaaagattattttgtcca

SEQ ID NO: 80320 - DNA, 110 bp, synthetic construct
  source 1..110: mol_type = other DNA
gttgggcctaaatctgttgaaatatacttattgaaattctgtagaactcatgaggttttgtgtgggtttacatttcaaaagtgcagctttttttctataagccagttctt

SEQ ID NO: 80321 - DNA, 110 bp, synthetic construct
  source 1..110: mol_type = other DNA
ttttgtgtgggtttacatttcaaaagtgcagctttttttctataagccagttcttatgtattaatatatacgcagtacttcttacactgaaatgaggtttgtcttttgag

SEQ ID NO: 80322 - DNA, 110 bp, synthetic construct
  source 1..110: mol_type = other DNA
tttttgatggtaacacattacaagttctctacatatatgcttagagtgcaaaagaccatacccatcagctataaaatgattgctgctatttatattaatgagtcaactta

SEQ ID NO: 80323 - DNA, 110 bp, synthetic construct
  source 1..110: mol_type = other DNA
ccatacccatcagctataaaatgattgctgctatttatattaatgagtcaacttactgcctttacattaactcagagaagtgcatctaggtacttgggccattgtggaaa

SEQ ID NO: 80324 - DNA, 110 bp, synthetic construct
  source 1..110: mol_type = other DNA
ccactactcttccaccatcttgtctcctctttctctgtatttttaaaccacacactcccaaggtttcctgactgttgacagatttagacacctacttgttgggtatcttc

SEQ ID NO: 80325 - DNA, 110 bp, synthetic construct
  source 1..110: mol_type = other DNA
tcccaaggtttcctgactgttgacagatttagacacctacttgttgggtatcttctctaatgccatgtatcttataagttcttgagagcatattattcaaagggcactga

SEQ ID NO: 80326 - DNA, 110 bp, synthetic construct
  source 1..110: mol_type = other DNA
tagggtaaacacatattgtagctccttagctaaacatcattctccattgtgtcctttcttctgtattgagactgggccaaattatccctgtcttcaaggaagtgttattt

SEQ ID NO: 80327 - DNA, 110 bp, synthetic construct
  source 1..110: mol_type = other DNA
ttcttctgtattgagactgggccaaattatccctgtcttcaaggaagtgttatttatttcattggcttccaccaattttgttttcatttcccttcctttccattactgga

SEQ ID NO: 80328 - DNA, 110 bp, synthetic construct
  source 1..110: mol_type = other DNA
atctctgtcacccagtaaaatttcttcattctcctttgtagtctgcccttcccattcttctcaacttctccctgtactgattaaatcactgatcttccttctcttactac

SEQ ID NO: 80329 - DNA, 110 bp, synthetic construct
  source 1..110: mol_type = other DNA
cccttcccattcttctcaacttctccctgtactgattaaatcactgatcttccttctcttactacagattagattcattttctaaaatctatgtaaatggaaacatactg

SEQ ID NO: 80330 - DNA, 110 bp, synthetic construct
  source 1..110: mol_type = other DNA
caaaagtggggattttaaggggggaaatttcattaatttattgatgcaaatttattgagttcctactctataccacattccatagaaatgaaaaagttatcttaacccct

SEQ ID NO: 80331 - DNA, 110 bp, synthetic construct; identical to SEQ ID NO: 80330
  source 1..110: mol_type = other DNA

SEQ ID NO: 80332 - DNA, 110 bp, synthetic construct
  source 1..110: mol_type = other DNA
cattaaagaggcagttattaggaagacagattgaagtatgcattattaccttctacactggcaagttcaaatatcagctgcagagagattggagtgatttggtctctctc

SEQ ID NO: 80333 - DNA, 110 bp, synthetic construct
  source 1..110: mol_type = other DNA
cactggcaagttcaaatatcagctgcagagagattggagtgatttggtctctctcttatcttggcttcatcatatgaaactctgtaacctccttcctatcttctgttttt

SEQ ID NO: 80334 - DNA, 110 bp, synthetic construct
  source 1..110: mol_type = other DNA
catagtccaaggttgaagcctacttgagaagagagggttctgagaagcctgaataaattttggttgagagaatctttgtcatgatctaccactctatgatgccactttca

SEQ ID NO: 80335 - DNA, 110 bp, synthetic construct
  source 1..110: mol_type = other DNA
aattttggttgagagaatctttgtcatgatctaccactctatgatgccactttcatctattcttccagtcacttttttctagctttgttcacttctccatataggagaaa

SEQ ID NO: 80336 - DNA, 110 bp, synthetic construct
  source 1..110: mol_type = other DNA
gtatggaatgatggagctgcatgaaagaataggtcgtcatttccataacttcagcccttactgggtttctaattcagctgtgatagagcacagtatgtggtgatttacat

SEQ ID NO: 80337 - DNA, 110 bp, synthetic construct
  source 1..110: mol_type = other DNA
ccttactgggtttctaattcagctgtgatagagcacagtatgtggtgatttacatgtcttcagttgacacacacatttcatgaaaataaaacactgggatatgtaataca

SEQ ID NO: 80338 - DNA, 110 bp, synthetic construct
  source 1..110: mol_type = other DNA
gttttttactttatatgtatgtaaagcttgtttgctcctgtgtgcatatctcttttttgtctggctgcctttaagattgtctttacattttaagcagtttgaaaataatc

SEQ ID NO: 80339 - DNA, 110 bp, synthetic construct
  source 1..110: mol_type = other DNA
tttgtctggctgcctttaagattgtctttacattttaagcagtttgaaaataatcttcttagaaatgtttgtgtttgcatgtgtatttccatgttatcctgcttgttttt

SEQ ID NO: 80340 - DNA, 110 bp, synthetic construct
  source 1..110: mol_type = other DNA
gcaatagcaagaggagggtacaggatatgtcttagatgagtggtactatgttgcattagcatcagggcatcttgtgtttctcaaatcttttcatacatgtttcatatctt

SEQ ID NO: 80341 - DNA, 110 bp, synthetic construct
  source 1..110: mol_type = other DNA
ttagcatcagggcatcttgtgtttctcaaatcttttcatacatgtttcatatcttgtcaactaacacataaacttttgatttgttacttgtaggggtatcatcacttccc

SEQ ID NO: 80342 - DNA, 110 bp, synthetic construct
  source 1..110: mol_type = other DNA
tgggggctgtggggcccttggtggagagaagcagcactgctgctgtgtttatgggtgacagtgatatgttttaagtcctaggacttcctccaagtccttagtgtttgctc

SEQ ID NO: 80343 - DNA, 110 bp, synthetic construct
  source 1..110: mol_type = other DNA
tgacagtgatatgttttaagtcctaggacttcctccaagtccttagtgtttgctcctctagcctccgtcacgtcttctttttattttgtattttgacatctgtgtataat

SEQ ID NO: 80344 - DNA, 110 bp, synthetic construct
  source 1..110: mol_type = other DNA
tccgttcttaattatttgtgtctttgcctgggtagtggcatgtctgagtcagcacttggcctcccacttggtggcccatagcgaagaatcttctccagttgcttagtatc

SEQ ID NO: 80345 - DNA, 110 bp, synthetic construct
  source 1..110: mol_type = other DNA
ttggcctcccacttggtggcccatagcgaagaatcttctccagttgcttagtatcagtgaccacaatgcctcagagcctggcttctagacatgacagaggcagaatagtg

SEQ ID NO: 80346 - DNA, 110 bp, synthetic construct
  source 1..110: mol_type = other DNA
gactcacctggtgagctcagtgggatttggagccagggcagcaaggtgccatgtttgcctgactgatgctccttgactgctcagtgtgttcatatgtttaaaggagaatc

SEQ ID NO: 80347 - DNA, 110 bp, synthetic construct
  source 1..110: mol_type = other DNA
gtgccatgtttgcctgactgatgctccttgactgctcagtgtgttcatatgtttaaaggagaatcctggacccaccccgtagtcacaagggcaggggtcctcagatcatg

SEQ ID NO: 80348 - DNA, 110 bp, synthetic construct
  source 1..110: mol_type = other DNA
tgtacaaaatctgtacaaaatgagaaatggtagataatgaccaaaatgtgcagaggcagaggcaaaaaaaatttgctgatttttacatttctgctcttatgtcacatggc

SEQ ID NO: 80349 - DNA, 110 bp, synthetic construct; identical to SEQ ID NO: 80348
  source 1..110: mol_type = other DNA

SEQ ID NO: 80350 - DNA, 110 bp, synthetic construct
  source 1..110: mol_type = other DNA
tcttccttgaggcatcaaacatttagccattaccttaagatgcctcagaaatgactaacagtaataagtaactggatcaaggcttgcttgtctagatagagataactcat

SEQ ID NO: 80351 - DNA, 110 bp, synthetic construct
  source 1..110: mol_type = other DNA
ctccctcagttgtcttcctctctgtaaatcaataaggagccatggatttagatgagccatccatttcttcatgtcaagttctccccttttgtggcagtttccattataca

SEQ ID NO: 80352 - DNA, 110 bp, synthetic construct
  source 1..110: mol_type = other DNA
gccatccatttcttcatgtcaagttctccccttttgtggcagtttccattatacaaggatgcctttgctttgtctctattatcagggaaagtgaaagccaagtaatgttc

SEQ ID NO: 80353 - DNA, 110 bp, synthetic construct
  source 1..110: mol_type = other DNA
gattcctgaaatctcactagtgtgacagtaatgttttatgatatgaatttgaattctcaattcttgttcacaaaaattggtcatgattgtgcttttggagctgagcatga

SEQ ID NO: 80354 - DNA, 110 bp, synthetic construct
  source 1..110: mol_type = other DNA
acttgccctcacccttttaggcttttctagtttgtttgggaagccctgccttattataagatctgcaagcaatcttttcctcgccaaatttgcttacttttgcaaagagt

SEQ ID NO: 80355 - DNA, 110 bp, synthetic construct
  source 1..110: mol_type = other DNA
ataagatctgcaagcaatcttttcctcgccaaatttgcttacttttgcaaagagtttggagttaccattgtggttcagcaggttaaagactcaacattgtctctgtgagg

SEQ ID NO: 80356 - DNA, 110 bp, synthetic construct
  source 1..110: mol_type = other DNA
tgaacactttttccaatgaggaatcttgttaatgtctttcctgccctctcatcaggctatcagcagagctgtgtacacagccgatgtattactttggttaatatgtcctg

SEQ ID NO: 80357 - DNA, 110 bp, synthetic construct
  source 1..110: mol_type = other DNA
gctatcagcagagctgtgtacacagccgatgtattactttggttaatatgtcctgcttgagatcatttttgaattacatacatacttatgtgcacacatacacataacgt

SEQ ID NO: 80358 - DNA, 110 bp, synthetic construct
  source 1..110: mol_type = other DNA
tattatcaaattcaggatagggagacataaggcctgaatctttccaacttatggggattttggctttagttattattttttcgtcgttgttggcctgattggctggagac

SEQ ID NO: 80359 - DNA, 110 bp, synthetic construct
  source 1..110: mol_type = other DNA
cataaggcctgaatctttccaacttatggggattttggctttagttattattttttcgtcgttgttggcctgattggctggagactgtcctagagagtaattcattaaca

SEQ ID NO: 80360 - DNA, 110 bp, synthetic construct
  source 1..110: mol_type = other DNA
acatctttccatgtctttgtatcatcttcaatgtccttcatcaatgtttaatagttttcagagtataggtctttcgccttcttggttaagtttattcctattttaatctt

SEQ ID NO: 80361 - DNA, 110 bp, synthetic construct; identical to SEQ ID NO: 80360
  source 1..110: mol_type = other DNA

SEQ ID NO: 80362 - DNA, 110 bp, synthetic construct
  source 1..110: mol_type = other DNA
gccttgtttggccttcactcttattcggcacaagtcttagaacttctaaaaatggctatttaccgcctgctcctaaggtgtgtggtccatctgcctcgcttgctgtgggg

SEQ ID NO: 80363 - DNA, 110 bp, synthetic construct
  source 1..110: mol_type = other DNA
ctatttaccgcctgctcctaaggtgtgtggtccatctgcctcgcttgctgtggggcactgtgaacacagtgctaagcattggcgtggttacttcttgggggatttcgtgt

SEQ ID NO: 80364 - DNA, 110 bp, synthetic construct
  source 1..110: mol_type = other DNA
ccaggcctgtgcttggcaacggagattcccattcatcgatttttacttctccccatttcaactctcactgccctccctgctcggggccgggcatccacctcctcctgcct

SEQ ID NO: 80365 - DNA, 110 bp, synthetic construct
  source 1..110: mol_type = other DNA
tttcaactctcactgccctccctgctcggggccgggcatccacctcctcctgcctagacaactgcgatcgctcctatctggtttccctgcatgttccctcttactcactc

SEQ ID NO: 80366 - DNA, 110 bp, synthetic construct
  source 1..110: mol_type = other DNA
ccaaaatgacccacaagaagttgaagatctccaatgatggattgcagatggagaaagatgaaagctctctgaagaagagccacaccccagagaggtttagtggcacaggg

SEQ ID NO: 80367 - DNA, 110 bp, synthetic construct
  source 1..110: mol_type = other DNA
agatgaaagctctctgaagaagagccacaccccagagaggtttagtggcacagggtgctatggggcagcaggaaatatattcattgacagtggctgccactactgggagg

SEQ ID NO: 80368 - DNA, 110 bp, synthetic construct
  source 1..110: mol_type = other DNA
atcagcccaagtccctctcctttgagagcaaaggagactgagacgctctctacattgaagcaggaggagaatcaaaggagtttggtcctcgaagccaagacaagcaagtg

SEQ ID NO: 80369 - DNA, 110 bp, synthetic construct
  source 1..110: mol_type = other DNA
ccctctgtctttcacccttcactgctaatccagtctctcacctccacccctgcctgtctgaccatctatggctttgcgtactctttctcccataattctcctttctggcc

SEQ ID NO: 80370 - DNA, 110 bp, synthetic construct
  source 1..110: mol_type = other DNA
gtctgaccatctatggctttgcgtactctttctcccataattctcctttctggccagctaattttttgagggcttgaaaaatgtgtgtttttctggatgtgtccctttgt

SEQ ID NO: 80371 - DNA, 110 bp, synthetic construct
  source 1..110: mol_type = other DNA
tgtatttatattacaatattggaactgaatctgctgtcttgcaggaggatgtcgggaggttagaaggaacctctgccacttactgactatgtgaccttgggcaaagagct

SEQ ID NO: 80372 - DNA, 110 bp, synthetic construct
  source 1..110: mol_type = other DNA
catgtgaggcccacgtgatggcccccagtggcttgtattcccctgggttcactgatcccccgaaggatcctatgagttacctcaggcagtcctccagcagctttcttaac

SEQ ID NO: 80373 - DNA, 110 bp, synthetic construct
  source 1..110: mol_type = other DNA
tcccccgaaggatcctatgagttacctcaggcagtcctccagcagctttcttaaccctgacacttcagtatgtatcagaatcacctggagagcttgtccaggcagcaggc

SEQ ID NO: 80374 - DNA, 110 bp, synthetic construct
  source 1..110: mol_type = other DNA
cttttgaaccatcgtctgtcatgagcctttcccctgagttctgtgaagagagctgcacaaatatttaccttccctccttgagtaaaaagtcaaataacatgttcagagca

SEQ ID NO: 80375 - DNA, 110 bp, synthetic construct
  source 1..110: mol_type = other DNA
ctgactcccactgacagggccgctgggtgaaccacattccacatcctctcccacctgggccaggcttcctgcttcgtacctcgtctcttcctccctcttcaatccgagcc

SEQ ID NO: 80376 - DNA, 110 bp, synthetic construct
  source 1..110: mol_type = other DNA
tgggccaggcttcctgcttcgtacctcgtctcttcctccctcttcaatccgagcccccaaatacttctctgcttatcacctctctttggtgatccattgcctagaggata

SEQ ID NO: 80377 - DNA, 110 bp, synthetic construct
  source 1..110: mol_type = other DNA
tctgttctgcagaacaaaggcccctaggctttaagcccacatggcttttattagggaaggtgacatgtttagatgtgtgagcgagagcaggcagagggagtgtagaagct

SEQ ID NO: 80378 - DNA, 110 bp, synthetic construct
  source 1..110: mol_type = other DNA
cccacatggcttttattagggaaggtgacatgtttagatgtgtgagcgagagcaggcagagggagtgtagaagctatcttttagtgagatttagggagactgctagcaat

SEQ ID NO: 80379 - DNA, 110 bp, synthetic construct
  source 1..110: mol_type = other DNA
ggcctgaaaatgaggaatgtggagtagatgatatgatcttaaggttccttccaactagaaaactctatgattcaatctaggctaatactaaaatccgtaaggacacaaag

SEQ ID NO: 80380 - DNA, 110 bp, synthetic construct
  source 1..110: mol_type = other DNA
tggtatattttgtgaggcatcttctgaactccttcacttctcttacctaaactgtggcaatagcccccttggtgacctctctgattctactcttgtctctctatagtctc

SEQ ID NO: 80381 - DNA, 110 bp, synthetic construct
  source 1..110: mol_type = other DNA
cccaaggtggagaaatcatctctctacagacatagaggcatgtcaattgggcagctgcttccatcttacattctttcctaaaggaatgtcctactaagtagacccaagaa

SEQ ID NO: 80382 - DNA, 110 bp, synthetic construct
  source 1..110: mol_type = other DNA
tgcttccatcttacattctttcctaaaggaatgtcctactaagtagacccaagaaatattctgttggttttgagctcgcccatgtgaacatcctcccacctcttacccct

SEQ ID NO: 80383 - DNA, 110 bp, synthetic construct
  source 1..110: mol_type = other DNA
gttacctacctgcttgagggaacagagaggttacattactagcattgcaaaagggtaaaaaggagaaaccttttaagaactacatttccaagttgagagctgctgtcatt

SEQ ID NO: 80384 - DNA, 110 bp, synthetic construct
  source 1..110: mol_type = other DNA
taaaaaggagaaaccttttaagaactacatttccaagttgagagctgctgtcattacttatctactccacagaaagcttggacacagatctgatggcctacagaagaact

SEQ ID NO: 80385 - DNA, 110 bp, synthetic construct
  source 1..110: mol_type = other DNA
atattttgtttttgagtttttttttttaacttaacacagggtttctcaaccgtgaaactattgacctttgtgctgtataattttctattgtgtgtgtgtgggggggtatt

SEQ ID NO: 80386 - DNA, 110 bp, synthetic construct; identical to SEQ ID NO: 80385
  source 1..110: mol_type = other DNA

SEQ ID NO: 80387 - DNA, 110 bp, synthetic construct
  source 1..110: mol_type = other DNA
atttgaagaagcttttatggctctgatagttagttttatgtgtcaaattacagggtgtttggggttgaaattaccattataatcagtgacctgtgagtaagcagattgcc

SEQ ID NO: 80388 - DNA, 110 bp, synthetic construct; identical to SEQ ID NO: 80387
  source 1..110: mol_type = other DNA

SEQ ID NO: 80389 - DNA, 110 bp, synthetic construct
  source 1..110: mol_type = other DNA
ctcctttaacagacctagaataaatcatgctatgatgtcaccctctctccccacatctcacatccccataccccattctgaacacccttaagcagagacaacacggtcag

SEQ ID NO: 80390 - DNA, 110 bp, synthetic construct; identical to SEQ ID NO: 80389
  source 1..110: mol_type = other DNA

SEQ ID NO: 80391 - DNA, 110 bp, synthetic construct
  source 1..110: mol_type = other DNA
aatttacctttatcttcaatagttttattgtgtaaaggatttctgccttttctctcagtttctacttttcatcaaattattactgtcctcctcataggtttcttgctgaa

SEQ ID NO: 80392 - DNA, 110 bp, synthetic construct
  source 1..110: mol_type = other DNA
cagtttctacttttcatcaaattattactgtcctcctcataggtttcttgctgaaaactttggacaacagtttcccaccctatcaaatgccatcaagcatacataaaaca

SEQ ID NO: 80393 - DNA, 110 bp, synthetic construct
  source 1..110: mol_type = other DNA
aagcatcaccgaagaatcccagtaatagtgttgtattcttttaccatacttgccatatctttcctgcttttctctgcatcatccccttactattcttgtccatcctctta

SEQ ID NO: 80394 - DNA, 110 bp, synthetic construct; identical to SEQ ID NO: 80393
  source 1..110: mol_type = other DNA

SEQ ID NO: 80395 - DNA, 110 bp, synthetic construct
  source 1..110: mol_type = other DNA
aaacccgcaacttcattgttcctaggcagattcgtttctgctgtgccatgacgggaactccttgtttggaattctttattccgtgtttccttgtgaattttttcttctat

SEQ ID NO: 80396 - DNA, 110 bp, synthetic construct; identical to SEQ ID NO: 80395
  source 1..110: mol_type = other DNA

SEQ ID NO: 80397 - DNA, 110 bp, synthetic construct
  source 1..110: mol_type = other DNA
gtgttctgactggcattaaatgtaattttggattagcttgactcttttgaagtctgttttaggctttgtggcatgggcataaggtgacatttactctagggctagtttag

SEQ ID NO: 80398 - DNA, 110 bp, synthetic construct
  source 1..110: mol_type = other DNA
gttttaggctttgtggcatgggcataaggtgacatttactctagggctagtttagttgtgttgctaaggtgtgactcttgtgggattctactgcatcattcaggtgcatg

SEQ ID NO: 80399 - DNA, 110 bp, synthetic construct
  source 1..110: mol_type = other DNA
ccccacttacatccccattttccagttcacaactgcctgtgcaaagacataggataagaataccttgcaaagtctgattcagacaatcagcaaatcctgcagaacagacc

SEQ ID NO: 80400 - DNA, 110 bp, synthetic construct
  source 1..110: mol_type = other DNA
cctgtgcaaagacataggataagaataccttgcaaagtctgattcagacaatcagcaaatcctgcagaacagaccctgactcacagactttgaaaaacttatggtttccc

SEQ ID NO: 80401 - DNA, 110 bp, synthetic construct
  source 1..110: mol_type = other DNA
gagtttttctcctgcctccaccggatgcacccattcctatcagtccacgcaggccaagatttcctccccagcctgcttgccaggtgcatgttctctgcctggatcatggt

SEQ ID NO: 80402 - DNA, 110 bp, synthetic construct
  source 1..110: mol_type = other DNA
aagatttcctccccagcctgcttgccaggtgcatgttctctgcctggatcatggtgtactcactgcccggaatttccctacctgccatctgcacgcgcgcgctagtggat

SEQ ID NO: 80403 - DNA, 110 bp, synthetic construct
  source 1..110: mol_type = other DNA
gttctaaatgtaaagtctgcatctaccaactccaaactcccggtccgcccccttttctcccctcctcccaccctggcaaacacaagtctgccctgcatgtccctcgtctg

SEQ ID NO: 80404 - DNA, 110 bp, synthetic construct
  source 1..110: mol_type = other DNA
tctgcatctaccaactccaaactcccggtccgcccccttttctcccctcctcccaccctggcaaacacaagtctgccctgcatgtccctcgtctgtttctgttttgtaga

SEQ ID NO: 80405 - DNA, 110 bp, synthetic construct
  source 1..110: mol_type = other DNA
ttcctagtcggattcgttaaccactgcgccacggcgggaactcctctatttttcattagtaagagggaagatgggttttaaagaggaagcagggagagatggtcactttc

SEQ ID NO: 80406 - DNA, 110 bp, synthetic construct
  source 1..110: mol_type = other DNA
attcacagagcaatcgtgtgtacttcatttcctggcagtttcagtatgtccgctgtgcagtaaccttattgctaacctcattagtgaaccctgttaagagaagacttgcc

SEQ ID NO: 80407 - DNA, 110 bp, synthetic construct
  source 1..110: mol_type = other DNA
tgcagtaaccttattgctaacctcattagtgaaccctgttaagagaagacttgcccagctgaatccatcctgtcaacactccaatcctggggctgaataacaagctagcc

SEQ ID NO: 80408 - DNA, 110 bp, synthetic construct
  source 1..110: mol_type = other DNA
aggaaatgtgactcccgagcaagtttttcaccactttcttccatgcttgctgcttggggattcaaagctgaatcagccgtcatccgggatccttagaagctgttggattg

SEQ ID NO: 80409 - DNA, 110 bp, synthetic construct
  source 1..110: mol_type = other DNA
ggggattcaaagctgaatcagccgtcatccgggatccttagaagctgttggattggggagagttacttagcatcctacgctcagtttcctcttctttgctgtctacctca

SEQ ID NO: 80410 - DNA, 110 bp, synthetic construct
  source 1..110: mol_type = other DNA
ctggtccctgtgtatagtcagattagttgataactttccttacaatgttttggcctcctcaggaagatgaataaaatcactacgggttgtgtacaacaatggtgaggctt

SEQ ID NO: 80411 - DNA, 110 bp, synthetic construct
  source 1..110: mol_type = other DNA
tcctcaggaagatgaataaaatcactacgggttgtgtacaacaatggtgaggcttaagttttcagatatgtaaagcctagccttctaaatattcagagggtaagttctag

SEQ ID NO: 80412 - DNA, 110 bp, synthetic construct
  source 1..110: mol_type = other DNA
actttaactctatacactgttttcattttcactttaaaagcaaatagtgatgatttaagtagctggcagtctgttgactttctgttgatagtgactgacctgtctccttg

SEQ ID NO: 80413 - DNA, 110 bp, synthetic construct
  source 1..110: mol_type = other DNA
taagtagctggcagtctgttgactttctgttgatagtgactgacctgtctccttgtcactgccaaacgagtggcttttctaatccagagacattagaaggtaggccctca

SEQ ID NO: 80414 - DNA, 110 bp, synthetic construct
  source 1..110: mol_type = other DNA
agggggagtgacatgaatggattgaaccaaaatgccacgaattttcttaccccctttcactggaaaccctcttggttttacaagggcctagttgctgtagcttctcaact

SEQ ID NO: 80415 - DNA, 110 bp, synthetic construct
  source 1..110: mol_type = other DNA
ttcactggaaaccctcttggttttacaagggcctagttgctgtagcttctcaactggtctctagcattctcacaaggtattctggtctgtgtattattgttaactcagtg

SEQ ID NO: 80416 - DNA, 110 bp, synthetic construct
  source 1..110: mol_type = other DNA
actttctcctgggttccctctgccttggtgttctactccccaatccatagcacaccactcccccagctgtggcacaattctctgtagccccttaggctgtcctcacacag

SEQ ID NO: 80417 - DNA, 110 bp, synthetic construct
  source 1..110: mol_type = other DNA
ccctctgccttggtgttctactccccaatccatagcacaccactcccccagctgtggcacaattctctgtagccccttaggctgtcctcacacagccaaccctagtcctc

SEQ ID NO: 80418 - DNA, 110 bp, synthetic construct
  source 1..110: mol_type = other DNA
gctgaggtatgtgcttcgtattggaaaatagcatgatacagagcttgagaattagtaagaattcagttcaggaaggactttccatgtaagatgcttgaattttactccaa

SEQ ID NO: 80419 - DNA, 110 bp, synthetic construct
  source 1..110: mol_type = other DNA
taagaattcagttcaggaaggactttccatgtaagatgcttgaattttactccaaaagtaatgaaaaaatacaaggttttaagtagagaagtgacacaatctgcttccac

SEQ ID NO: 80420 - DNA, 110 bp, synthetic construct
  source 1..110: mol_type = other DNA
tgccgaccacagtgattggtctacagtaagaactcaacatgttcgctctctttatcttttcattcttttaactcacttcccccactcctccaccctagagctcatcaggt

SEQ ID NO: 80421 - DNA, 110 bp, synthetic construct
  source 1..110: mol_type = other DNA
cttttcattcttttaactcacttcccccactcctccaccctagagctcatcaggtaaaaaccgcgggaaaaaacaccttgaggcacaagaggaaatgcttgacctggggg

SEQ ID NO: 80422 - DNA, 110 bp, synthetic construct
  source 1..110: mol_type = other DNA
tcacaatgtgtgcaaccctcagcaccactgctagaacatttccatcgcccctaaaataaatctagtactcattagcaatcacgctccattcactcctcgccctagttctt

SEQ ID NO: 80423 - DNA, 110 bp, synthetic construct
  source 1..110: mol_type = other DNA
ataaatctagtactcattagcaatcacgctccattcactcctcgccctagttcttggccaccaccaatctactttgtctctatgaatttgccttttctggacatctcata

SEQ ID NO: 80424 - DNA, 110 bp, synthetic construct
  source 1..110: mol_type = other DNA
ctgtgttgtgaatatgcacgtgcacacacacacagtatcatctttctgatagacaagatggtcgcatgtcataagatagtctgaaaacaaatatccatataacaaaaact

SEQ ID NO: 80425 - DNA, 110 bp, synthetic construct
  source 1..110: mol_type = other DNA
agatggtcgcatgtcataagatagtctgaaaacaaatatccatataacaaaaacttacggactcttcagaaactaatccctcttggatggggtacatgatgatcgtacct

SEQ ID NO: 80426 - DNA, 110 bp, synthetic construct
  source 1..110: mol_type = other DNA
ttaaaaaatcagtcttaggtggaattattatatgttactgaagtataatgtattatctgttcaaattattctctgtccttctgtacaaagtccatcactgtctctctggg

SEQ ID NO: 80427 - DNA, 110 bp, synthetic construct
  source 1..110: mol_type = other DNA
tctgttcaaattattctctgtccttctgtacaaagtccatcactgtctctctggggcctgtcttggtgggaagattatcattcctactatactactgtcaggcttattct

SEQ ID NO: 80428 - DNA, 110 bp, synthetic construct
  source 1..110: mol_type = other DNA
ctgaacttctgacctactgactacaagtcatgttcccatgaccccctccttaggtttggttaatttgctagaactgctcacaaaactcaggaaaaccttttactcactag

SEQ ID NO: 80429 - DNA, 110 bp, synthetic construct
  source 1..110: mol_type = other DNA
ttggttaatttgctagaactgctcacaaaactcaggaaaaccttttactcactagatgaccagatacaaatcaacagtcagatgaataaatacatagaactgaggtctgg

SEQ ID NO: 80430 - DNA, 110 bp, synthetic construct
  source 1..110: mol_type = other DNA
tggtttcctttgctgtataagagcttttaatttacctaggtatcattagtttatttttggttttattttcattattctaggaggtagatcccaaaagatactgtggtgat

SEQ ID NO: 80431 - DNA, 110 bp, synthetic construct; identical to SEQ ID NO: 80430
  source 1..110: mol_type = other DNA

SEQ ID NO: 80432 - DNA, 110 bp, synthetic construct
  source 1..110: mol_type = other DNA
accaaaaaatgtgtaactcactttacttcagtggtctggaactgaacctatatcatctctgaggtgtgcccgtatattccaggattcaaagcttaattatttatttcatt

SEQ ID NO: 80433 - DNA, 110 bp, synthetic construct
  source 1..110: mol_type = other DNA
ttctgtactgttttttagaaatcatttgattccttttgcttgctttagtttgctctttttttcccagttaggtttgaaggttaggctatagatgtttaaactttcttctt

SEQ ID NO: 80434 - DNA, 110 bp, synthetic construct; identical to SEQ ID NO: 80433
  source 1..110: mol_type = other DNA

SEQ ID NO: 80435 - DNA, 110 bp, synthetic construct
  source 1..110: mol_type = other DNA
ccaaagtatgtgaagatcctcacagatttgctgaagaatttaatacagtcatctagacttatcagtctggtatctccagcttagatcagcgagtttatagtattgttggt

SEQ ID NO: 80436 - DNA, 110 bp, synthetic construct
  source 1..110: mol_type = other DNA
cagaatctctgaaatggcccctaatgagttaagggatgacagctctcttggaggaaagtgaatccagatgaggacagtgctcaggagggctcgtgcccaacacagtgtca

SEQ ID NO: 80437 - DNA, 110 bp, synthetic construct
  source 1..110: mol_type = other DNA
ccagcgaggtaaggaaatttagtagcagttattcaggttctagaaatcacagccggcaatgggtctgggtcaagcaggctaggcaagccagtcagagcaaaagggaaggg

SEQ ID NO: 80438 - DNA, 110 bp, synthetic construct
  source 1..110: mol_type = other DNA
gttcttccatgttaagcattatcctttccagacattctcttttcttctagttaaactccctgggagaggggtagctatttggtccttgacccctcagtgtcgctctgaca

SEQ ID NO: 80439 - DNA, 110 bp, synthetic construct
  source 1..110: mol_type = other DNA
ctccctgggagaggggtagctatttggtccttgacccctcagtgtcgctctgacactttccccaggtatggtgcacgtggcccctctcctctgcgagttctcccagagcc

SEQ ID NO: 80440 - DNA, 110 bp, synthetic construct; identical to SEQ ID NO: 80438
  source 1..110: mol_type = other DNA

SEQ ID NO: 80441 - DNA, 110 bp, synthetic construct; identical to SEQ ID NO: 80439
  source 1..110: mol_type = other DNA

SEQ ID NO: 80442 - DNA, 110 bp, synthetic construct
  source 1..110: mol_type = other DNA
tactcccgtagggttttccaccctgtgtaacctctccactccaggatgcctacttccctaggcctttttctttcctctcgcctttgccaggacagctcaggtgtttctac

SEQ ID NO: 80443 - DNA, 110 bp, synthetic construct
  source 1..110: mol_type = other DNA
ccctaggcctttttctttcctctcgcctttgccaggacagctcaggtgtttctactttgtttagtggttgccatcactttctccagtcatcttaagagccactttagtag

SEQ ID NO: 80444 - DNA, 110 bp, synthetic construct
  source 1..110: mol_type = other DNA
accaggaaaccttacctgactgttttctcccatccaacatattgatttaagtgataattttctgtatctccatgtgactcatgatggatctaggtttaagccgtagtcac

SEQ ID NO: 80445 - DNA, 110 bp, synthetic construct
  source 1..110: mol_type = other DNA
aattttctgtatctccatgtgactcatgatggatctaggtttaagccgtagtcacattatctggtgttttaccactgcattttcagtgcctagagctatgtttggcagga

SEQ ID NO: 80446 - DNA, 110 bp, synthetic construct
  source 1..110: mol_type = other DNA
caaaagtaaatttcgtccccatccacttcaccagctaagcttatcaagcctaagttatcaatgaggaaaaaaaggactattgacctggcaatatactaggtgatttaact

SEQ ID NO: 80447 - DNA, 110 bp, synthetic construct
  source 1..110: mol_type = other DNA
tgacttcattactatgtctgggtatgccactaattaagttttagggctcagtcttctagccgtttctcataaacaaataacaacggtgcttgcgaggggtcagaaaataa

SEQ ID NO: 80448 - DNA, 110 bp, synthetic construct
  source 1..110: mol_type = other DNA
ctagccgtttctcataaacaaataacaacggtgcttgcgaggggtcagaaaataatcattcatgaaatctatatcaagcactgataaccttttgcaggtttacttccaat

SEQ ID NO: 80449 - DNA, 110 bp, synthetic construct
  source 1..110: mol_type = other DNA
cttctctgggcaccttcctccaatgtgcaaaactctctcttgtggtaggaatatgataggtttgtttctcctatggatgaagtcaacacagtggatgatcgggttaggac

SEQ ID NO: 80450 - DNA, 110 bp, synthetic construct
  source 1..110: mol_type = other DNA
agactatgtatatcacaaaagtggcacctgtaaacattcaggagttagtcacacggtcctgaatttacattttacccattaggaccgtagcctcctttgttggaatgatc

SEQ ID NO: 80451 - DNA, 110 bp, synthetic construct
  source 1..110: mol_type = other DNA
agagaagctttaacagacgacactgacagattttcatgtcatcacagcgcattctctttcttaggatccacctttataataacatctttgtgtgtcactcttcccagctc

SEQ ID NO: 80452 - DNA, 110 bp, synthetic construct
  source 1..110: mol_type = other DNA
ctttcttaggatccacctttataataacatctttgtgtgtcactcttcccagctcccgatttccgaccctgtttctgatctgtgtcagaaagacaccatcgatatgttca

SEQ ID NO: 80453 - DNA, 110 bp, synthetic construct
  source 1..110: mol_type = other DNA
ttaccctcctgccgtttgtagtaaatgatccctgtttaagtttcctgtagctcaaagggtgtgagatgggacgaaagctactattacggaagaacgctttgctccatgtg

SEQ ID NO: 80454 - DNA, 110 bp, synthetic construct
  source 1..110: mol_type = other DNA
agggtgtgagatgggacgaaagctactattacggaagaacgctttgctccatgtgcagcactcagacctaggttttctggccttagaacatcttgatggcatcttccttc

SEQ ID NO: 80455 - DNA, 110 bp, synthetic construct
  source 1..110: mol_type = other DNA
ccgcaactgccgagctcaatgtgtaactgggtggcaaatagccacatcttgaaagcatgtttcatgagccgataggttcaagtggcccgaggtggaccgtgccgtctgct

SEQ ID NO: 80456 - DNA, 110 bp, synthetic construct
  source 1..110: mol_type = other DNA
ccccacatgatggactgaatgctgagtctcccaggtgggccctgtctccccgcttcctagagcgctcggaagccagcagaagtatgtgtctgtggcacaggattgcacat

SEQ ID NO: 80457 - DNA, 110 bp, synthetic construct
  source 1..110: mol_type = other DNA
atgcatacaaatcacctggggaacctgttagaaaatacaaattcaatgctgcagacgtgggatggggcctgagatcctgccttcctgcctttctcgctctctttctttct

SEQ ID NO: 80458 - DNA, 110 bp, synthetic construct
  source 1..110: mol_type = other DNA
cgtgggatggggcctgagatcctgccttcctgcctttctcgctctctttctttctttttggctttttagggccacacctgcagcacaggtaggttcccaggctaggggtc

SEQ ID NO: 80459 - DNA, 110 bp, synthetic construct
  source 1..110: mol_type = other DNA
aggggatgctggggaagagagctggtcatctgtaaggacttttcctttctttctactctttgatccacggaaagaaccatcagcttaggccaggtattgcgtgatcaaaa

SEQ ID NO: 80460 - DNA, 110 bp, synthetic construct
  source 1..110: mol_type = other DNA
ctctttgatccacggaaagaaccatcagcttaggccaggtattgcgtgatcaaaagatctgaacagtgtgccagggctggagacaagtagagctcagggctgccaggttg

SEQ ID NO: 80461 - DNA, 110 bp, synthetic construct
  source 1..110: mol_type = other DNA
tcataggccaacattgtattgtgttatgtattcttaattttctgggcgtggccgcagcatgcagaagttccggggcagcgatcgaacctgagccacagcagtgacaatac

SEQ ID NO: 80462 - DNA, 110 bp, synthetic construct
  source 1..110: mol_type = other DNA
gtattgtgttatgtattcttaattttctgggcgtggccgcagcatgcagaagttccggggcagcgatcgaacctgagccacagcagtgacaataccgaatccttaaccgc

SEQ ID NO: 80463 - DNA, 110 bp, synthetic construct
  source 1..110: mol_type = other DNA
tgatccatcctcatgagcctgatatttgcaacactggattttttttttttaagagcgtacggttagtttcactttgaagacacgctgcattcaaaacatatttggtttct

SEQ ID NO: 80464 - DNA, 110 bp, synthetic construct
  source 1..110: mol_type = other DNA
cgtacggttagtttcactttgaagacacgctgcattcaaaacatatttggtttctattgtcttaacaaacctgctatgtgacatttttggattatttctcttggttgcta

SEQ ID NO: 80465 - DNA, 110 bp, synthetic construct
  source 1..110: mol_type = other DNA
ctccctcctttaatggttttcctgcattgcccacacaaagcaccagcagccgttgtagagcggagcaacgtgcagtttacgcggtcatgggtttttcgggtcgggttctc

SEQ ID NO: 80466 - DNA, 110 bp, synthetic construct
  source 1..110: mol_type = other DNA
tagagcggagcaacgtgcagtttacgcggtcatgggtttttcgggtcgggttctctgcaggccagcaggtattgctagagatgacatgagcaggagacaggatgttgccg

SEQ ID NO: 80467 - DNA, 110 bp, synthetic construct
  source 1..110: mol_type = other DNA
gccacatctgagccacatctgcgacctacagaatggctgtgtttttctttgtttttgttttttggtcttttcgccttttctagggctgctcccatggcatgtggaggttt

SEQ ID NO: 80468 - DNA, 110 bp, synthetic construct; identical to SEQ ID NO: 80467
  source 1..110: mol_type = other DNA

SEQ ID NO: 80469 - DNA, 110 bp, synthetic construct
  source 1..110: mol_type = other DNA
gtaaagcctgactgcatctcaggcgtgggctctcctattcccttattttcggggaccctatgaacatggaaaataaagatgtctgtggctaccgcggtaatcccttcccc

SEQ ID NO: 80470 - DNA, 110 bp, synthetic construct
  source 1..110: mol_type = other DNA
ccctatgaacatggaaaataaagatgtctgtggctaccgcggtaatcccttcccctacctccctgtagatgtaccatgagataaaaaccgtcaagcattgccatgtccaa

SEQ ID NO: 80471 - DNA, 110 bp, synthetic construct
  source 1..110: mol_type = other DNA
atgttgcaatcagagatacaacagaaatgtacacaggtgaaaatggcaaacgtccaccaatgaaaagtgcattcgttcacatttccttcctggtctgctcctggtgaggg

SEQ ID NO: 80472 - DNA, 110 bp, synthetic construct
  source 1..110: mol_type = other DNA
accaatgaaaagtgcattcgttcacatttccttcctggtctgctcctggtgagggcccgacctccaggcagactcagtctgacaaaagaggcaaaggtgcagcccctggc

SEQ ID NO: 80473 - DNA, 110 bp, synthetic construct
  source 1..110: mol_type = other DNA
gtccagctcctccagcactacttgttgagaaggctatccctccatcaaactctcctcgtacatttgttaaaagcaactgagcatgtttgtgtctcgttctggattctttc

SEQ ID NO: 80474 - DNA, 110 bp, synthetic construct
  source 1..110: mol_type = other DNA
tcgtacatttgttaaaagcaactgagcatgtttgtgtctcgttctggattctttcttccattggccaatgtgtctgtccctccaccgatactacgctgtcttgattactg

SEQ ID NO: 80475 - DNA, 110 bp, synthetic construct
  source 1..110: mol_type = other DNA
ttgcccatcctcaaaatgggattaataattgttcctgcttcacatacagttgccacgtggattaaatgagttaacactgatatctgtaagcacttagaacagctcctagc

SEQ ID NO: 80476 - DNA, 110 bp, synthetic construct
  source 1..110: mol_type = other DNA
cgtggattaaatgagttaacactgatatctgtaagcacttagaacagctcctagcaaacagcgagcactgtgtgtatgttacacttcaagacatagatgccaataataaa

SEQ ID NO: 80477 - DNA, 110 bp, synthetic construct; identical to SEQ ID NO: 80475
  source 1..110: mol_type = other DNA

SEQ ID NO: 80478 - DNA, 110 bp, synthetic construct; identical to SEQ ID NO: 80476
  source 1..110: mol_type = other DNA

SEQ ID NO: 80479 - DNA, 110 bp, synthetic construct
  source 1..110: mol_type = other DNA
aataaagaacaagagtacttgacttagaatttcaagacaggtattgggattttaaaatttttttgtctgtttagggccacacctgtggcatatggaggttcccaggttag

SEQ ID NO: 80480 - DNA, 110 bp, synthetic construct
  source 1..110: mol_type = other DNA
ctcgcatggttgccatttccttttttccaagtttcttaacctttttattgtgttatttaaaaatgcttgtataggagttcccgttgtggctcagcgggttaagaacctga

SEQ ID NO: 80481 - DNA, 110 bp, synthetic construct
  source 1..110: mol_type = other DNA
tttccttttttccaagtttcttaacctttttattgtgttatttaaaaatgcttgtataggagttcccgttgtggctcagcgggttaagaacctgacatagtgtccctgtc

SEQ ID NO: 80482 - DNA, 110 bp, synthetic construct
  source 1..110: mol_type = other DNA
agcatcatgacatagcatttgaggattaaaatggggttttgaaagggttcctaactagctgcagccttgacatgaggcagcacgttccctgtggagcagcatgctatggg

SEQ ID NO: 80483 - DNA, 110 bp, synthetic construct
  source 1..110: mol_type = other DNA
tagctgcagccttgacatgaggcagcacgttccctgtggagcagcatgctatgggcacaactttccccgaaacaaggtaggtcacagttcctttgcttgctaggtgagca

SEQ ID NO: 80484 - DNA, 110 bp, synthetic construct
  source 1..110: mol_type = other DNA
agacaaaaagacagaaaaaaaaagtaaccagttttggagggcctaagttagcaatgatttgatctttgttccattccagtcagcaatcagcaggtgtacaaacatttctt

SEQ ID NO: 80485 - DNA, 110 bp, synthetic construct
  source 1..110: mol_type = other DNA
gatttgatctttgttccattccagtcagcaatcagcaggtgtacaaacatttcttagaaagtagctttctcttttattcaaatcaatggaccaggctggccctatgaata

SEQ ID NO: 80486 - DNA, 110 bp, synthetic construct
  source 1..110: mol_type = other DNA
aagtgaagatattgtttgaatttctgtattcttttttaatctggttgtcttaggcatgttccccatacaatctgaattaaaggtctcctaaaatcaatctgcctaaatgg

SEQ ID NO: 80487 - DNA, 110 bp, synthetic construct; identical to SEQ ID NO: 80486
  source 1..110: mol_type = other DNA

SEQ ID NO: 80488 - DNA, 110 bp, synthetic construct
  source 1..110: mol_type = other DNA
tgtgataatttctgctctacaacagagcgattcagttatatacatacacatatccattttttttcccatgtatattatcacataatattgagtagagttccctgtgctac

SEQ ID NO: 80489 - DNA, 110 bp, synthetic construct; identical to SEQ ID NO: 80488
  source 1..110: mol_type = other DNA

SEQ ID NO: 80490 - DNA, 110 bp, synthetic construct
  source 1..110: mol_type = other DNA
aacctatagcatggttccatctgtaacagccaccttcatcgcctctgtagtcagctggccatcagaaactccctgggggccatagaaatggattgagggagttacaacca

SEQ ID NO: 80491 - DNA, 110 bp, synthetic construct
  source 1..110: mol_type = other DNA
caagcctcgggcattttcgcctgagatagtttcacaatgaatactgctcattacaacctacggtgcccgtgctcagaagaatcggttttgatattaatatttatcagtgg

SEQ ID NO: 80492 - DNA, 110 bp, synthetic construct
  source 1..110: mol_type = other DNA
acctacggtgcccgtgctcagaagaatcggttttgatattaatatttatcagtggatgctgcagatttcactttctacatctagtggggatttctctacttcagatcctt

SEQ ID NO: 80493 - DNA, 110 bp, synthetic construct
  source 1..110: mol_type = other DNA
tctcttcccatagagcaagggaatgactggaatgcagatggtagtcctggatgccctggatgtacagtcaacagtcaagcttttacagggggactggttgcttaattcac

SEQ ID NO: 80494 - DNA, 110 bp, synthetic construct
  source 1..110: mol_type = other DNA
gagaaggacaggtcttagctgttctttatatgtttggtagaattcccctgtgaagctattcagtcctggacttttatttgctggaagttttttaagttacacattcaatt

SEQ ID NO: 80495 - DNA, 110 bp, synthetic construct
  source 1..110: mol_type = other DNA
ctattcagtcctggacttttatttgctggaagttttttaagttacacattcaatttcactaccagtaatctgtctgttcaaattgtctgtttcttcctttctgtcttggc

SEQ ID NO: 80496 - DNA, 110 bp, synthetic construct
  source 1..110: mol_type = other DNA
gaaatggcagagccaggtgagaagtctggggactgcatcagccacaaactggcttttttccattctcagtgtctgttttatccttatgtcgttgttttaatagaacatcc

SEQ ID NO: 80497 - DNA, 110 bp, synthetic construct
  source 1..110: mol_type = other DNA
ttttccattctcagtgtctgttttatccttatgtcgttgttttaatagaacatcctgcatcctcatggtctggtgatattatgggtccccactgtatactgtggccatct

SEQ ID NO: 80498 - DNA, 110 bp, synthetic construct
  source 1..110: mol_type = other DNA
tcaaaaacaaaacaaaacaactttggcccaagtctcataccttatacaaaaaacgaaaaatcacagatcgaaatgtaaaagtacataattttagagaagatgtccgatac

SEQ ID NO: 80499 - DNA, 110 bp, synthetic construct
  source 1..110: mol_type = other DNA
tgatgggagaaagacattgagaaagaaagaattttggttttctctttttttctttagggaattttcaaagatgtaaaagtaaagcaattcatagtacataagggagcctc

SEQ ID NO: 80500 - DNA, 110 bp, synthetic construct; identical to SEQ ID NO: 80499
  source 1..110: mol_type = other DNA

SEQ ID NO: 80501 - DNA, 110 bp, synthetic construct
  source 1..110: mol_type = other DNA
gatttctaaaataagagactttttggagttttttctctgtggaacagtgggttaatgatctggcttgtctctgtgctagtgccggttcaatccctggcctggtgcaatgg

SEQ ID NO: 80502 - DNA, 110 bp, synthetic construct
  source 1..110: mol_type = other DNA
tgatctggcttgtctctgtgctagtgccggttcaatccctggcctggtgcaatgggttaagaatctggcattgctgcagctctaacagctccggctcagatttgatccct

SEQ ID NO: 80503 - DNA, 110 bp, synthetic construct
  source 1..110: mol_type = other DNA
ttggattcgttaatcactgcgccacgatgggaactacggaatcatcattcttcatgcctctctgcccttcatctcccatccaatccatcaccaagtactgcctcttctgc

SEQ ID NO: 80504 - DNA, 110 bp, synthetic construct; identical to SEQ ID NO: 80503
  source 1..110: mol_type = other DNA

SEQ ID NO: 80505 - DNA, 110 bp, synthetic construct
  source 1..110: mol_type = other DNA
agttggtaaaaccttttaagctgttcttcagacatctccgaagtctgtggttttcatcttgttctgaagtccaatctgagctcggaatgggatgtatgcgtcaaggtgct

SEQ ID NO: 80506 - DNA, 110 bp, synthetic construct
  source 1..110: mol_type = other DNA
atcttgttctgaagtccaatctgagctcggaatgggatgtatgcgtcaaggtgcttttaacaacaggactgtttagtgcagggtagaaacatctttgagtcagatcctgc

SEQ ID NO: 80507 - DNA, 110 bp, synthetic construct
  source 1..110: mol_type = other DNA
cgggggatgacaacggtctctgcaccatgacttgtgtgtggccaccagcaactgcccatggcccctgcacccatcgcttcccaactttctgtcagtttcccatggtcatc

SEQ ID NO: 80508 - DNA, 110 bp, synthetic construct
  source 1..110: mol_type = other DNA
ccatggcccctgcacccatcgcttcccaactttctgtcagtttcccatggtcatccaagctgctcagctcttacctgcagctgacttttcaggggtgtgacttgtctctt

SEQ ID NO: 80509 - DNA, 110 bp, synthetic construct
  source 1..110: mol_type = other DNA
gaaggagttcatcattgctaggggccccccgggacaatggtctcagatccacatggagcccctggggctgcagcctccttattctttttttcaagtggtgaagccacctc

SEQ ID NO: 80510 - DNA, 110 bp, synthetic construct
  source 1..110: mol_type = other DNA
tcagagtctacaaagtacagctcccctgcgtggacgtctgaaaagttagccagaaattcccgggggctgaagccaacccacacggtatacctataatccaccgtgcgtat

SEQ ID NO: 80511 - DNA, 110 bp, synthetic construct
  source 1..110: mol_type = other DNA
attcccgggggctgaagccaacccacacggtatacctataatccaccgtgcgtatggaatagcccatgaccttgatgtcttttaaactcggcttgtctgagttccactga

SEQ ID NO: 80512 - DNA, 110 bp, synthetic construct
  source 1..110: mol_type = other DNA
acttctgcatattttgtacccattactagactgaattatctttttatttccagtagtcttctagctctgtagccttgtcatcggcaacaaatgactgttttacctctcct

SEQ ID NO: 80513 - DNA, 110 bp, synthetic construct
  source 1..110: mol_type = other DNA
gtcttctagctctgtagccttgtcatcggcaacaaatgactgttttacctctcctttctttctcttatcttaattttatgtgctggcataataacaaactggttctgata

SEQ ID NO: 80514 - DNA, 110 bp, synthetic construct
  source 1..110: mol_type = other DNA
agggttcgaggccgctgcctgtgattcagatttctgcaaatccaatcatgtttccaatgacctaagggggtttcattttaaggcaatccttcagtgaatgcttttcttag

SEQ ID NO: 80515 - DNA, 110 bp, synthetic construct
  source 1..110: mol_type = other DNA
atgggattacagatatttttaccttaacttcccatttctgtttgtttttgactcaaacccaagataagcaatactcttttaatttgttattccaactccatttaccctgg

SEQ ID NO: 80516 - DNA, 110 bp, synthetic construct
  source 1..110: mol_type = other DNA
aacccaagataagcaatactcttttaatttgttattccaactccatttaccctgggctcctggacatttcataattacgatctggccaggctgttcattttatcctgaat

SEQ ID NO: 80517 - DNA, 110 bp, synthetic construct
  source 1..110: mol_type = other DNA
tcattcctagaactctcccttcttgctgctctaaggacactgtttacttccactcccctcctcctcctcctctgggctcctcaccttcatttttgcctgagactgtcttc

SEQ ID NO: 80518 - DNA, 110 bp, synthetic construct
  source 1..110: mol_type = other DNA
ccctcctcctcctcctctgggctcctcaccttcatttttgcctgagactgtcttcctggcccctctttcatttttcccgtcctaaagaagtcatctgttgggagacaagt

SEQ ID NO: 80519 - DNA, 110 bp, synthetic construct
  source 1..110: mol_type = other DNA
gaggctttcgctgccagcagtatattaatgtccagcatcccctccctcacaggtgacccagctccaccttctggagaaggccttgcctctgtccctatacagcactccag

SEQ ID NO: 80520 - DNA, 110 bp, synthetic construct
  source 1..110: mol_type = other DNA
gagaaaagggagacttcctacacttttgttgggaatgtaacttggtacaactgtgatggagaacaagatggagtttccttcaaaaactgaatacaggaattcccatcgtg

SEQ ID NO: 80521 - DNA, 110 bp, synthetic construct
  source 1..110: mol_type = other DNA
cttattgcaaagaggaaaaagtttgagatgaatacaaaagcttctatcaaaactgctaaggaaaagattgatcgtgtttggaaaacacaacaggaacaaaggtgaagtgg

SEQ ID NO: 80522 - DNA, 110 bp, synthetic construct
  source 1..110: mol_type = other DNA
attataacctttagtttagtcatatgcagtacaaagaaataaagagccagggaaggcgggactggggcttggggactggcacgtgcgccctgtcgcctgcggaaagactg

SEQ ID NO: 80523 - DNA, 110 bp, synthetic construct
  source 1..110: mol_type = other DNA
gcagatgagctcgcctcacccaccatcagattcgggctctgtctgttgcccgagtagtgtccgaggctgggagggcatcctctagaccacctcctccaggaagaccacaa

SEQ ID NO: 80524 - DNA, 110 bp, synthetic construct
  source 1..110: mol_type = other DNA
agtgtccgaggctgggagggcatcctctagaccacctcctccaggaagaccacaaagctgtcagccacagcccagctggccctgagtgaggcacctacttctggacccct

SEQ ID NO: 80525 - DNA, 110 bp, synthetic construct
  source 1..110: mol_type = other DNA
attcaacactcctgtagaaggcagcttggttattccctcagattatgcaggtgggtgggaggtgaccacaaagtgctaggaaacctgactgtggtggggaaataatcaga

SEQ ID NO: 80526 - DNA, 110 bp, synthetic construct
  source 1..110: mol_type = other DNA
caagtctgtgctccaccctacaccctgagggagcctgttataagtcacatcccacgtgactgctcacagtggctccttgcctccttcaaggtcaaaggcaaagtccacca

SEQ ID NO: 80527 - DNA, 110 bp, synthetic construct
  source 1..110: mol_type = other DNA
acctgtcatatggacggcagcggggggcagggggggtgcttttccgttagctgttcattaaaagacaaggagcacaaaatcgatttctttcctaacgactggagaacctg

SEQ ID NO: 80528 - DNA, 110 bp, synthetic construct
  source 1..110: mol_type = other DNA
cattaaaagacaaggagcacaaaatcgatttctttcctaacgactggagaacctggaaaggctgtgaggcaccgccagtcggtacctttccatcagctgccttctcctgg

SEQ ID NO: 80529 - DNA, 110 bp, synthetic construct
  source 1..110: mol_type = other DNA
ctgcctttgcaacttttgcatcgaactaaaatgataccaccgtcaaaaggtcactttttaagaaattgtctgggggaaaggggcagtataaatgaaaggacaggcaacat

SEQ ID NO: 80530 - DNA, 110 bp, synthetic construct
  source 1..110: mol_type = other DNA
ttttaagaaattgtctgggggaaaggggcagtataaatgaaaggacaggcaacattcaccagtaaaaaggcaaacgatccgcttagaatatggacaaaagacattttacc

SEQ ID NO: 80531 - DNA, 110 bp, synthetic construct
  source 1..110: mol_type = other DNA
aaagcgctgcgagccacctccagcaagggatgcagcttaaatgcacattgctacgtaaaagaagccagcctgaaaaaggctgcctgctgtatgattccatctatacgaca

SEQ ID NO: 80532 - DNA, 110 bp, synthetic construct
  source 1..110: mol_type = other DNA
aaagcacttgggaaggaacaggctgcaaatctagagacttaccgagtcctccagtttgggctccgggaacgggaccaagaccgagagcatcagaaggaaactcacccggt

SEQ ID NO: 80533 - DNA, 110 bp, synthetic construct
  source 1..110: mol_type = other DNA
ttgggctccgggaacgggaccaagaccgagagcatcagaaggaaactcacccggtcaagtcagcaattatttgccatggtcttaatttggatgtctgggtggtcgtctca

SEQ ID NO: 80534 - DNA, 110 bp, synthetic construct
  source 1..110: mol_type = other DNA
ctgccggttagtttgaatctggacaaggtcctgatgctgcgttctctcgatgagtatcttagatctcccctcatctataagctccccttccctcaccctcttttgttctt

SEQ ID NO: 80535 - DNA, 110 bp, synthetic construct
  source 1..110: mol_type = other DNA
tcgccacagagtgctcaggtcccccccccccgtggaccccgtacctgaacacagacttgacatgcagcatgagctccggcccgatgccatcccccgggatcatggtcacc

SEQ ID NO: 80536 - DNA, 110 bp, synthetic construct
  source 1..110: mol_type = other DNA
cttgacatgcagcatgagctccggcccgatgccatcccccgggatcatggtcaccgtgtgccgccccccatacttggccgacggaggctagaaggcgggggagagcggcc

SEQ ID NO: 80537 - DNA, 110 bp, synthetic construct
  source 1..110: mol_type = other DNA
tcttctgtgaggacccgcacgggagcggacacgagcccagcagagccaagctccgcgttgtaagccattgtaaagggcgaacactgcgaagagcccaagggcctgccatc

SEQ ID NO: 80538 - DNA, 110 bp, synthetic construct
  source 1..110: mol_type = other DNA
cgccaactaggactagaagagaacttaacctgataaagagcacctaccacaaacccacagctaacttcataccccctgatgaaagactggaagcttccctccaagatcgg

SEQ ID NO: 80539 - DNA, 110 bp, synthetic construct
  source 1..110: mol_type = other DNA
cacagctaacttcataccccctgatgaaagactggaagcttccctccaagatcggaaacaaggcaaagatgcccactgccaccacttccattcaacgtggtactggaggt

SEQ ID NO: 80540 - DNA, 110 bp, synthetic construct
  source 1..110: mol_type = other DNA
tactgcttgcttctggctcctcggtgcggtggcccagcgggtgttgcgggagacggtgagacggccaaagtctccaagcactacgttatgtcaggaaggagaggggccag

SEQ ID NO: 80541 - DNA, 110 bp, synthetic construct
  source 1..110: mol_type = other DNA
tttgcttctgctcccccttggcttctagggctccaggacaaccacgcgttaccctttctccgcgtgccttttgggttctgagctcactgtggttcaagcacctaccagac

SEQ ID NO: 80542 - DNA, 110 bp, synthetic construct
  source 1..110: mol_type = other DNA
ccgagatgtcaccttcccctgggaacctaagacaactgagagcactgagtggttggctggcacgccacatcgctgggtttcttcttcagggcatgcaaccaagcctgggt

SEQ ID NO: 80543 - DNA, 110 bp, synthetic construct
  source 1..110: mol_type = other DNA
aacacgggaggcaactggaggcggtttggcgagtcttgcagggccactgccacctcccagacacagcgagacagcaagtggttatttcaaaaaaagtctttttaattgtt

SEQ ID NO: 80544 - DNA, 110 bp, synthetic construct
  source 1..110: mol_type = other DNA
ttctgtgtggatggatgcttccctttgtcttgggtctgtagctgggagtggacaggctggaacgtgggctaatgccgcgttgaatggttaccacagcaacggacagggct

SEQ ID NO: 80545 - DNA, 110 bp, synthetic construct
  source 1..110: mol_type = other DNA
cgaggatgaagaattcttcaggcccctcgagaaagctcatcatgcaaacagggcccagtcataaggagaagcaagagccaaggcaaggccctgaccccaggaacaatcca

SEQ ID NO: 80546 - DNA, 110 bp, synthetic construct
  source 1..110: mol_type = other DNA
gccggggtgggccctcatcccgactcctagggttctaacggggttggggcagccaaggaatgttccagaaagagcagcagagggggcagtgaccacattcccgatacccc

SEQ ID NO: 80547 - DNA, 110 bp, synthetic construct
  source 1..110: mol_type = other DNA
ctgccccactagctcccattgctgaagcactactcgtgtgctgtgtcttggttcctgcctcagggtggggacctcacctgtctcttgtgcctttaccagagcttaggcac

SEQ ID NO: 80548 - DNA, 110 bp, synthetic construct
  source 1..110: mol_type = other DNA
tgcctcagggtggggacctcacctgtctcttgtgcctttaccagagcttaggcacccagagtggacgtgaagtgactctacacctgggcccttaaggctcaccctaggcc

SEQ ID NO: 80549 - DNA, 110 bp, synthetic construct
  source 1..110: mol_type = other DNA
agcaggatttctaaggaggtggacgcaggtgctccggctggtgaggacgcggggcagtatttttggcaaaggctgtcggaagtgacctccacgacccgtctttggagagc

SEQ ID NO: 80550 - DNA, 110 bp, synthetic construct
  source 1..110: mol_type = other DNA
gtggccgttgggggggaccatctgccttcggcaagaggccttgtccaaggcttgttggtcagctgcacaggaggagtcatgtggggaccgtggagtccagaaggtggctt

SEQ ID NO: 80551 - DNA, 110 bp, synthetic construct
  source 1..110: mol_type = other DNA
ggccggagtcttcgctgcactttgtgtaaaagatgacgacctaactgtttcatattttcactttttgttctttgctatgagatgttaaaaaacattgttttggccctacc

SEQ ID NO: 80552 - DNA, 110 bp, synthetic construct
  source 1..110: mol_type = other DNA
tttcactttttgttctttgctatgagatgttaaaaaacattgttttggccctaccagcggcatgtgcaagttcccaggccgggagtcacacctgagccacagcagtgaca

SEQ ID NO: 80553 - DNA, 110 bp, synthetic construct
  source 1..110: mol_type = other DNA
actgcaggactgtttattacttcagagtaagcagagaaatcactgggcttatccgaaattttacacagaaacaggggcccttcccttccaccattcaacctattttaaag

SEQ ID NO: 80554 - DNA, 110 bp, synthetic construct
  source 1..110: mol_type = other DNA
aagcaagaatttatttaaaataatagtacaaaatgtaaatttttttttggtctttttgcctttttgggggccactcttgtgacacttggaggttcccaggctaggggtcc

SEQ ID NO: 80555 - DNA, 110 bp, synthetic construct; identical to SEQ ID NO: 80554
  source 1..110: mol_type = other DNA

SEQ ID NO: 80556 - DNA, 110 bp, synthetic construct
  source 1..110: mol_type = other DNA
taaggctttaaggagcatctcaaattcacagacaggtcctactgacaaccagcgcaggggtatttaaatatgtttcgaatgaaaagcaaaatcttcctggttatactgac

SEQ ID NO: 80557 - DNA, 110 bp, synthetic construct
  source 1..110: mol_type = other DNA
acgttgctctcttggcctgtggtctgttcctgtgccggcaccgcgctgtcttgcttctgcagtgttgccttcgctattcctagcctttgcctttacacagaaattgcaga

SEQ ID NO: 80558 - DNA, 110 bp, synthetic construct
  source 1..110: mol_type = other DNA
atgtaaactcgtgtacctggtgttgacacgttccaacgagatgttcccgaagggtcagaaacggtctccagagcccgagtttacacggcctgagtcgcgccttggtcgtt

SEQ ID NO: 80559 - DNA, 110 bp, synthetic construct
  source 1..110: mol_type = other DNA
acgagatgttcccgaagggtcagaaacggtctccagagcccgagtttacacggcctgagtcgcgccttggtcgttggcaagttggcggcggcggcggcgggaacgggggc

SEQ ID NO: 80560 - DNA, 110 bp, synthetic construct
  source 1..110: mol_type = other DNA
tcagtgaacttgaggatagctcagttatctgagtctgagaatcagaaaagttacgaagggacaggacctcagagacccatcagacaacatcaaccataacgggaagtcca

SEQ ID NO: 80561 - DNA, 110 bp, synthetic construct
  source 1..110: mol_type = other DNA
acagccccctgtgcatagccgtggttccagccagggccagggccctggcacacaaggtacaactcacccaggtactggggacattttaccagaaccaggctcccctggtc

SEQ ID NO: 80562 - DNA, 110 bp, synthetic construct
  source 1..110: mol_type = other DNA
atgaaagacattcttattggaaaggaagaagtaaaactatctctattctcagacgacaggatcttctgtatagaacaccctgaagaatccacaaaacacccttagccttg

SEQ ID NO: 80563 - DNA, 110 bp, synthetic construct
  source 1..110: mol_type = other DNA
gcaaagcttctaggctctgccatctgacaaatctgggtttttatcctggtcccctaacccttgtatgacccaccctaaccctgcttgggttttccttttttcctaccact

SEQ ID NO: 80564 - DNA, 110 bp, synthetic construct
  source 1..110: mol_type = other DNA
aacccttgtatgacccaccctaaccctgcttgggttttccttttttcctaccactccctcacttccacgaatctccttttccttgaattaaacattccctgtggtccaac

SEQ ID NO: 80565 - DNA, 110 bp, synthetic construct
  source 1..110: mol_type = other DNA
cttagtaccatactggctttttaaacctttcaggggccagatccactgatcattctcaaacaagagtcccctgaggaaagctgtaccaattactagtccctgatctttcc

SEQ ID NO: 80566 - DNA, 110 bp, synthetic construct
  source 1..110: mol_type = other DNA
tgtggccagatgtttagtatatcctcatcacctccatagtacacttctggtgcgtgaatgtggacacaagagcccagcacgaagtgtggtaggctgtataaaaagatata

SEQ ID NO: 80567 - DNA, 110 bp, synthetic construct
  source 1..110: mol_type = other DNA
atctttttctgactagttttctcctctttggttctccaatcccccaattttagcatccaagtgtactcaaactcaagtctctgtcttaactcagaaaaactaatgcattc

SEQ ID NO: 80568 - DNA, 110 bp, synthetic construct
  source 1..110: mol_type = other DNA
tcgagctcagcagtttgttcaaggcagagtgttggccactcagtcccatttcagtttttaaaatttgagatgcttcctctctcgtcgtgttcagcactggggagtggagc

SEQ ID NO: 80569 - DNA, 110 bp, synthetic construct
  source 1..110: mol_type = other DNA
ttttaaaatttgagatgcttcctctctcgtcgtgttcagcactggggagtggagcagtggagtggttgaaaatgggaggtttaaatgtttaatgtataatgtctgtagaa

SEQ ID NO: 80570 - DNA, 110 bp, synthetic construct
  source 1..110: mol_type = other DNA
atcagtgaaagatttgcttacagtttcttcttagaagatgaatagcctgcatttcctggatacatttcccacccacccccctgcagaaaaagtaaaggaagctcgcctgg

SEQ ID NO: 80571 - DNA, 110 bp, synthetic construct
  source 1..110: mol_type = other DNA
ctggatacatttcccacccacccccctgcagaaaaagtaaaggaagctcgcctggggctctaagagggacggccattttagagaggtgtttcttgaaaatagtttccata

SEQ ID NO: 80572 - DNA, 110 bp, synthetic construct
  source 1..110: mol_type = other DNA
agccttcaagcacaacagagataaatacaaaaaaaaaaaataggaaaaataataataacacgcaaggcaaagaagttgatcctgcctgctaatctgtgcacagtattctc

SEQ ID NO: 80573 - DNA, 110 bp, synthetic construct
  source 1..110: mol_type = other DNA
taacacgcaaggcaaagaagttgatcctgcctgctaatctgtgcacagtattctcagggtctgcacagcgttgaaggggcttcaggctgggctcctgcagagactgcctg

SEQ ID NO: 80574 - DNA, 110 bp, synthetic construct
  source 1..110: mol_type = other DNA
ggaacacctcgatagagtcaagctgtcctgattcatcagcgtctgggtttggatgtggacgctgcatcatttccgttcttttcagtcttccagtttcaaaatattttcct

SEQ ID NO: 80575 - DNA, 110 bp, synthetic construct
  source 1..110: mol_type = other DNA
tggacgctgcatcatttccgttcttttcagtcttccagtttcaaaatattttcctggttgtgtcacgtccgaatgtcccctccaatccatgtggacacaccacgtggaaa

SEQ ID NO: 80576 - DNA, 110 bp, synthetic construct
  source 1..110: mol_type = other DNA
gtagctggcagtgctgaagatagctgggcaggtgccagcctgcgtctgatcatcaccccctttgaacctgaacgagcacagtagctagagagcactggacataaaggatg

SEQ ID NO: 80577 - DNA, 110 bp, synthetic construct
  source 1..110: mol_type = other DNA
ccccctttgaacctgaacgagcacagtagctagagagcactggacataaaggatggacagggacctcaaagtccttgagacagattcttcatcctccctgagaactgcct

SEQ ID NO: 80578 - DNA, 110 bp, synthetic construct
  source 1..110: mol_type = other DNA
cgaaccaaaagtcatgatgctttgtcagaaccactcaatttgaggaggacaatggaataggtcccttagactcagcttatgagttcaggtgtatgtttagtacctgacgc

SEQ ID NO: 80579 - DNA, 110 bp, synthetic construct
  source 1..110: mol_type = other DNA
aataggtcccttagactcagcttatgagttcaggtgtatgtttagtacctgacgcccgtcacctctgccacaaataggtcctgatcactgaatgccaggtatggttcttg

SEQ ID NO: 80580 - DNA, 110 bp, synthetic construct
  source 1..110: mol_type = other DNA
tggcacagctgtcctgtgcccgaacggtcctggtgtgtgtgtcctttgaagccctcatgtaaacagctcccgtacggtctcaggtattcaggggaatgttttaaatcaga

SEQ ID NO: 80581 - DNA, 110 bp, synthetic construct
  source 1..110: mol_type = other DNA
catgtaaacagctcccgtacggtctcaggtattcaggggaatgttttaaatcagattaactgtaaaggagggcctctgacagtcgtctggaaccgtggcggtgaagagga

SEQ ID NO: 80582 - DNA, 110 bp, synthetic construct
  source 1..110: mol_type = other DNA
cttgagcacaatgaaatttggtagtttgatgtcatccattcactcaatctttctggtcttctgtgttatgctcaaacacaatatattctgtaatgctttttcccaatgcc

SEQ ID NO: 80583 - DNA, 110 bp, synthetic construct
  source 1..110: mol_type = other DNA
taaggccatccattctcgttttcattttcttaggctgaaatcttggagtggaaaatcattcttgtttcaaggagcaagcaatccatacatccaactgagggcggaattct

SEQ ID NO: 80584 - DNA, 110 bp, synthetic construct
  source 1..110: mol_type = other DNA
tcattcttgtttcaaggagcaagcaatccatacatccaactgagggcggaattctcagaaggaaaaacacacggtaaagatttataatttaaatgacttgccactcagat

SEQ ID NO: 80585 - DNA, 110 bp, synthetic construct
  source 1..110: mol_type = other DNA
aaggatacttattagatttctaacctgctacaccacaacaggacctcctagtccttctttgtgtgtttgttttggctgtgcctgcagcatgcataagttcctgggccagg

SEQ ID NO: 80586 - DNA, 110 bp, synthetic construct
  source 1..110: mol_type = other DNA
atttctaacctgctacaccacaacaggacctcctagtccttctttgtgtgtttgttttggctgtgcctgcagcatgcataagttcctgggccagggatcaaacccatacc

SEQ ID NO: 80587 - DNA, 110 bp, synthetic construct
  source 1..110: mol_type = other DNA
aactgtgcattagataggaaagccaagtgtgagaagacgctggtgcaaatatacacctcctcacacacacgcaaactctattattcatctattctctatccttcccacaa

SEQ ID NO: 80588 - DNA, 110 bp, synthetic construct
  source 1..110: mol_type = other DNA
cctcctcacacacacgcaaactctattattcatctattctctatccttcccacaaagctgcttgaaaatctgtgtcaagagacacccacagccatttccatttgcagctg

SEQ ID NO: 80589 - DNA, 110 bp, synthetic construct
  source 1..110: mol_type = other DNA
cagaggaaggagcccccccctttccagctcacaccattgtaggtaggactcaagtcctctcaggttcttagagtccggcccccggttcttttatgatggtcgcccagagg

SEQ ID NO: 80590 - DNA, 110 bp, synthetic construct
  source 1..110: mol_type = other DNA
cctctcaggttcttagagtccggcccccggttcttttatgatggtcgcccagaggtttccctcagctccttgcctcatgggcgtctcacacgcttcaacgtgtatcatca

SEQ ID NO: 80591 - DNA, 110 bp, synthetic construct
  source 1..110: mol_type = other DNA
ctggcacaactatgaacaggcgtcctgtttcctttatctacagccgcatctcaactctcaccggggacggtacgattgcacctgagctgcccccagttacaggtcaccgg

SEQ ID NO: 80592 - DNA, 110 bp, synthetic construct
  source 1..110: mol_type = other DNA
tctcaccggggacggtacgattgcacctgagctgcccccagttacaggtcaccggtggctgcactagagactgtgcccggatagggcagctggcttgctcatcttctcca

SEQ ID NO: 80593 - DNA, 110 bp, synthetic construct
  source 1..110: mol_type = other DNA
gaagcaccagtggtcagcggggccctgcggcccttcctccctgctctgccagccacctggcttcttctctgcatcccttcttctctctgagttgcagccgagcagcccct

SEQ ID NO: 80594 - DNA, 110 bp, synthetic construct
  source 1..110: mol_type = other DNA
ccagcccgggacccaggtgaagcagcttctttgttcaaccgatgttggaaggagagaagagtctcaattttgacctaacaccccttgttctctctgccttccaccggggt

SEQ ID NO: 80595 - DNA, 110 bp, synthetic construct
  source 1..110: mol_type = other DNA
gaagagtctcaattttgacctaacaccccttgttctctctgccttccaccggggttccttagggaagcggcacagagtcagtttacactgctgaagccatgaggacaaag

SEQ ID NO: 80596 - DNA, 110 bp, synthetic construct
  source 1..110: mol_type = other DNA
cacctactgtgctgattttctttttgctgctgtggtcagttgttatccatctcttgtttgttccctcttctgtctccattccaaaagttacagtgtgtccccaggttcct

SEQ ID NO: 80597 - DNA, 110 bp, synthetic construct
  source 1..110: mol_type = other DNA
acagcttttcttttctgctaaaagtttagggccataatggtaattaaagcagtaaaaaaggcaattgcttaagagccctcccttcgcaccccgcttttggtcgttccttc

SEQ ID NO: 80598 - DNA, 110 bp, synthetic construct
  source 1..110: mol_type = other DNA
acttgatgagaacgaggcccagaagggctggactgagcgtgttaaatcagatgctattaccatggtcacgtgagatgacgtatttgcatttttctgattccatttaaact

SEQ ID NO: 80599 - DNA, 110 bp, synthetic construct
  source 1..110: mol_type = other DNA
ctcagaaggctgcctgcaaccgtgagcacagaagggaggttctggaacattctctttagagcaggacacttaacagttccacacaggggaaagggttgcaggaattcttt

SEQ ID NO: 80600 - DNA, 110 bp, synthetic construct
  source 1..110: mol_type = other DNA
ttagagcaggacacttaacagttccacacaggggaaagggttgcaggaattctttcagagattgcaattccaacagacatccaattggcaacattaaaagttgtcttttc

SEQ ID NO: 80601 - DNA, 110 bp, synthetic construct
  source 1..110: mol_type = other DNA
ctgacctggctcgcattcctcacctaccccagctttccctgggtcacagtcctgtgcacccaccacctccttctgcgccctttaaggctattttctaggctgctcgtcat

SEQ ID NO: 80602 - DNA, 110 bp, synthetic construct
  source 1..110: mol_type = other DNA
gcctggagacaaacagcctcccccaaggaagcagttccttctgtgattcaactgcagtccttggcttcaagctctgtcctgctgactgaaatctggctttaccttgtgcc

SEQ ID NO: 80603 - DNA, 110 bp, synthetic construct
  source 1..110: mol_type = other DNA
gctgccgtgacaggagtgttttcacagcatcaggagctgattcaacgaccagcgatccgtcttctctgacaggacgcataaacccgggaagggctccatgtgacagggtc

SEQ ID NO: 80604 - DNA, 110 bp, synthetic construct
  source 1..110: mol_type = other DNA
acagtgtcctcctaagagacagaagaggtgacacagacacagagcagaagtcaagggaagatggaggcagaggcggccaccagcccagggccacctggcacccccagaag

SEQ ID NO: 80605 - DNA, 110 bp, synthetic construct
  source 1..110: mol_type = other DNA
ccagggaactccatgcctagggatttcgtagccagtcaagctgacatgtatgacgaaccctcccatcgtccttgggttttctgcctggggcagaatgtctggtgcacctg

SEQ ID NO: 80606 - DNA, 110 bp, synthetic construct
  source 1..110: mol_type = other DNA
ccacctgagatgctcattctgcccgagctgaatacacagtctttcatttgctgaattttccttcctcaggtccagctgttcccgccccactgatccatgtcttcaggtgc

SEQ ID NO: 80607 - DNA, 110 bp, synthetic construct
  source 1..110: mol_type = other DNA
ttttccttcctcaggtccagctgttcccgccccactgatccatgtcttcaggtgcctgattgatgaccaaagcaatgtcacagacacattcttacgaaggacacgcatgg

SEQ ID NO: 80608 - DNA, 110 bp, synthetic construct
  source 1..110: mol_type = other DNA
ctataaaacttggacgaaactcacacagacgtggggtccaggggtggctctctctcatgctgaaaccgtttagggtttctcacgggcgggacgggatccttgcagaccct

SEQ ID NO: 80609 - DNA, 110 bp, synthetic construct
  source 1..110: mol_type = other DNA
catgctgaaaccgtttagggtttctcacgggcgggacgggatccttgcagaccctgggctggggggacggccagccctgccacaaactcaagtgcgacagactttttgtc

SEQ ID NO: 80610 - DNA, 110 bp, synthetic construct
  source 1..110: mol_type = other DNA
catgaacagagagcacagtttaaaaaaaaaaaaaaagaagaagaaaaaaaaatgaacagaaccaggaaaaaaaaaaaaaggcagtcaatgagagcatccaaaatgacaga

SEQ ID NO: 80611 - DNA, 110 bp, synthetic construct
  source 1..110: mol_type = other DNA
ttggtgagccgtcttcactgcagagagaagggcaaggtgccatcaccccacggaccaccaggcaccattcctggacccccaactgtggctgtgatgactctgaaatgacc

SEQ ID NO: 80612 - DNA, 110 bp, synthetic construct
  source 1..110: mol_type = other DNA
caccaggcaccattcctggacccccaactgtggctgtgatgactctgaaatgacctatacggagttcccatggtggctcagcaggttaaggacctagcatcgttgcaagc

SEQ ID NO: 80613 - DNA, 110 bp, synthetic construct
  source 1..110: mol_type = other DNA
acagtgcactccaaggggcacagggaatcgatacttaaaaaaagcaacaaacaaacacacaaacactacggggcaaatgaaaaccagcaaagctcgctggctttcaccat

SEQ ID NO: 80614 - DNA, 110 bp, synthetic construct
  source 1..110: mol_type = other DNA
ccatccatctagctgtccatcacctaatttagctgtgtaccatctgagtgtgtgcctcatctctctatatctatatggatctatatcaatcgcagtggctcatagccaag

SEQ ID NO: 80615 - DNA, 110 bp, synthetic construct
  source 1..110: mol_type = other DNA
ctcatctctctatatctatatggatctatatcaatcgcagtggctcatagccaaggtcagttgtgcccccagggcacacatggtcaagtatggggacaatttgcttgtaa

SEQ ID NO: 80616 - DNA, 110 bp, synthetic construct
  source 1..110: mol_type = other DNA
agctgttcagactctacagagtcacttcctgagggtagagctgaaacatccatattctctaaagctccctggctgcagtttgagatcagatgtccagagctgtcaaacca

SEQ ID NO: 80617 - DNA, 110 bp, synthetic construct
  source 1..110: mol_type = other DNA
gtatgaagacctgatctaaagcctggttgggtgaattaaggccagtagattgatataaagaaaactctcatggagatccctcttagctccctgagttaaagatttctctt

SEQ ID NO: 80618 - DNA, 110 bp, synthetic construct
  source 1..110: mol_type = other DNA
taaagaaaactctcatggagatccctcttagctccctgagttaaagatttctctttgtctctgtgctgggtttggtaacctctgtggcttgaaaacaatcgatgggcaga

SEQ ID NO: 80619 - DNA, 110 bp, synthetic construct
  source 1..110: mol_type = other DNA
gggagaaaatacagacaacttattaacgcgtaagtaaagccactgaccggtcccttccccatcccgaggcacgggtggcagcaaccacttggacgacgccgccaccagag

SEQ ID NO: 80620 - DNA, 110 bp, synthetic construct
  source 1..110: mol_type = other DNA
tccccatcccgaggcacgggtggcagcaaccacttggacgacgccgccaccagaggtaactcgagctcaagttaccccgatgagcggttgcagccggtcggtagccacgt

SEQ ID NO: 80621 - DNA, 110 bp, synthetic construct
  source 1..110: mol_type = other DNA
attttcagtgttcttttaggtggtggttgttgttgttgttgttgttagtagtagtagtagtactagtagtagtaatctttttagggctgcacctgcttcatacgaaggtt

SEQ ID NO: 80622 - DNA, 110 bp, synthetic construct; identical to SEQ ID NO: 80621
  source 1..110: mol_type = other DNA

SEQ ID NO: 80623 - DNA, 110 bp, synthetic construct
  source 1..110: mol_type = other DNA
cgtacctgctacctttatgcttgtgtctttagatgaaggaccaggtcctccaattaaatatcagtatgctgaattaggcaagttgtactcagtagtgtctcaactgatcc

SEQ ID NO: 80624 - DNA, 110 bp, synthetic construct
  source 1..110: mol_type = other DNA
ggacagctgggaaggctaccctgtccttacctgccctcacaatgccaggtctcccggaagtggggcccctgaacttgtagcatggagtcttctacccaagatttactcac

SEQ ID NO: 80625 - DNA, 110 bp, synthetic construct
  source 1..110: mol_type = other DNA
tcttggttgttgtttttttaatcgaacctcttgattggggaaaatagagcaggttcctcttgttttctaggttagtatttctgttaggttttaaatggctgctgttagtg

SEQ ID NO: 80626 - DNA, 110 bp, synthetic construct
  source 1..110: mol_type = other DNA
cctcttgttttctaggttagtatttctgttaggttttaaatggctgctgttagtgacatagtaagtgagagaatggttggatggatcagctgtagaatggcagagactta

SEQ ID NO: 80627 - DNA, 110 bp, synthetic construct
  source 1..110: mol_type = other DNA
atgctaaattcgtagctctcactacagcttctgcatcggcaagagggaagcccgccactatccacgcagattccagatgtgctcttggagtctgccatgttgttggaatg

SEQ ID NO: 80628 - DNA, 110 bp, synthetic construct
  source 1..110: mol_type = other DNA
tagatcagagatgctttcaacaaagcaggtgctttttctggccatagagtgagctgagtgggagctgtcttgcttttcaggagtgtcagaagcaatgctattggaggtac

SEQ ID NO: 80629 - DNA, 110 bp, synthetic construct
  source 1..110: mol_type = other DNA
agagtgagctgagtgggagctgtcttgcttttcaggagtgtcagaagcaatgctattggaggtaccacccatgaggtcatagaagttctcataatatcaggccatagatg

SEQ ID NO: 80630 - DNA, 110 bp, synthetic construct
  source 1..110: mol_type = other DNA
tccaaggttctaaaagtgcaggctcagcattggggctgatggcgtcttgagcagatcccaccacaagcacccagctgattataagttgtttcctggatgccagggactct

SEQ ID NO: 80631 - DNA, 110 bp, synthetic construct
  source 1..110: mol_type = other DNA
gtgcaggctcagcattggggctgatggcgtcttgagcagatcccaccacaagcacccagctgattataagttgtttcctggatgccagggactctctgctaaaagaagga
